(19) United States
(12) Patent Application Publication
(10) Pub. No.: US 2014/0330032 A1
(43) Pub. Date: Nov. 6, 2014

(54) MICROBIAL PRODUCTION OF CHEMICAL PRODUCTS AND RELATED COMPOSITIONS, METHODS AND SYSTEMS

(71) Applicants: Michael D. Lynch, Durham, NC (US); Tanya E.W. Lipscomb, Boulder, CO (US); Ashley D, Trahan, Hillsborough, NC (US); Amarjeet Singh, Kirkland, WA (US); Travis Wolter, Denver, CO (US)

(72) Inventors: Michael D. Lynch, Durham, NC (US); Tanya E.W. Lipscomb, Boulder, CO (US); Ashley D, Trahan, Hillsborough, NC (US); Amarjeet Singh, Kirkland, WA (US); Travis Wolter, Denver, CO (US)

(21) Appl. No.: 14/006,014

(22) PCT Filed: Mar. 22, 2012
(86) PCT No.: PCT/US12/30209

§ 371 Date: Apr. 10, 2014

Related U.S. Application Data
(60) Provisional application No. 61/466,363, filed on Mar. 22, 2011.
(60) Provisional application No. 61/466,433, filed on Mar. 22, 2011.
(60) Provisional application No. 61/539,378, filed on Sep. 26, 2011.
(60) Provisional application No. 61/539,162, filed on Sep. 26, 2011.

(51) Int. Cl. C12P 7/64; C07C 53/126; C12N 15/70

(52) U.S. Cl. CPC C12P 7/6409; C12N 15/70; C07C 53/126
USPC 554/1; 435/134; 435/252.33

(57) ABSTRACT

Metabolically engineered microorganism strains are disclosed, such as bacterial strains, in which there is an increased utilization of malonyl-CoA for production of a chemical product. Such chemical products include polyketides, 3-hydroxypropionic acid, and various other chemical products described herein. Methods of production also may be applied to further downstream products, such as consumer products. In various embodiments, modifications to a microorganism and/or culture system divert, at least transiently, usage of malonyl-coA from the fatty acid biosynthesis pathway and thereby provides for usage of the malonyl-coA for a chemical product other than a fatty acid. In various embodiments, the fatty acid biosynthesis pathway is modulated to produce specific fatty acids or combinations of fatty acids.

### RELATED APPLICATIONS

[0001] This application claims priority to U.S. provisional patent applications U.S. 61/466,363, filed on Mar. 22, 2011; U.S. 61/466,433, filed on Mar. 22, 2011; U.S. 61/539,162, filed Sep. 26, 2011; and U.S. 61/539,378, filed Sep. 26, 2011; each of which are hereby incorporated by reference in their entirety.

### STATEMENT AS TO FEDERALLY SPONSORED RESEARCH

[0002] This invention was made with Government support under DE-AR0000088 awarded by the United States Department of Energy. The Government has certain rights in this invention.

### SEQUENCE LISTINGS

[0003] The instant application contains a Sequence Listing which has been submitted in ASCII format via EFS-Web and is hereby incorporated by reference in its entirety. Said ASCII copy, created on Mar. 22, 2012, is named 34246760.txt and is 848 kbytes in size.

### INCORPORATION BY REFERENCE

[0004] All publications, patents, and patent applications mentioned in this specification are herein incorporated by reference to the same extent as if each individual publication, patent, or patent application was specifically and individually indicated to be incorporated by reference.

### BACKGROUND OF THE INVENTION

[0005] There is increased emphasis on renewable production of fuels and industrial chemicals as spikes in petroleum costs occur and as petroleum finite resources are consumed. Notwithstanding advances in the general field, there remains a need to find metabolic solutions to renewable production so as to increase rate, productivity, yield, and overall cost-effectiveness for biosynthesis of various chemical products.

### SUMMARY OF THE INVENTION

[0006] Disclosed herein is a method for producing a chemical, the method comprising combining a carbon source, a microorganism, and a cell culture to produce the chemical, wherein a) said cell culture comprises an inhibitor of fatty acid synthase and/or the microorganism is genetically modified for reduced enzymatic activity in at least two of the microorganism's fatty acid synthase pathway enzymes, providing for reduced conversion of malonyl-CoA to fatty acids; and b) the microorganism additionally has one or more genetic modifications relating to a metabolic production pathway from malonyl-CoA to the chemical. In various embodiments, the at least two fatty acid synthase pathway enzymes with reduced enzymatic activity are an enoyl-coA reductase and a beta-ketoacyl-ACP synthase. In one example, the enoyl-coA reductase is fabI or a peptide of 80% or more homology to SEQ ID NO: 14. In addition, the beta-ketoacyl-ACP synthase may be selected from the group consisting of fabB, fabF, a peptide of 80% or more homology to SEQ ID NO: 9, and a peptide of 80% or more homology to SEQ ID NO: 8. In various emdodiments, a third fatty acid synthase pathway enzyme is modified for reduced enzymatic activity. For example, the enoyl-coA reductase is fabI or a peptide of 80% or more homology to SEQ ID NO: 14, the beta-ketoacyl-ACP synthase is fabB or a peptide of 80% homology or more to SEQ ID NO: 9, and the third fatty acid synthase pathway enzyme is fabF or a peptide of 80% homology or more to SEQ ID NO: 8.

[0007] In various embodiments, the third fatty acid synthase pathway enzyme is a malonyl-coA-ACP transacylase. For example, the malonyl-coA-ACP transacylase is modified fabD or a peptide of 80% or more homology to SEQ ID NO: 7. In various embodiments, the enoyl-coA reductase is fabI or a peptide of 80% or more homology to SEQ ID NO: 14, the beta-ketoacyl-ACP synthase is selected from the group consisting of fabB or a peptide of 80% homology or more to SEQ ID NO: 9, and fabF or a peptide of 80% homology or more to SEQ ID NO: 8, and the malonyl-coA-ACP transacylase is fabD or a peptide of 80% or more homology to SEQ ID NO: 7.

[0008] In various emdodiments, the at least two fatty acid synthase pathway enzymes with reduced enzymatic activity are an enoyl-coA reductase and a malonyl-coA-ACP transacylase. For example, the enoyl-coA reductase is fabI or a peptide of 80% or more homology to SEQ ID NO: 14. As an additional example, the malonyl-coA-ACP transacylase is fabD or a peptide of 80% or more homology to SEQ ID NO: 7.

[0009] Also disclosed are methods as described above, where the microorganism is E. coli. In any of the embodiments described herein, the method may be performed at above room temperature. Preferably, the method is performed at a temperature between 25° C. and 50° C.

[0010] Also disclosed are methods as described herein, where the microorganism has one or more genetic modifications to increase levels of pantothenate. As an example, the one or more genetic modifications to increase levels of pantothenate is a modification of panE or a peptide of 80% or more homology to panE.

[0011] In various embodiments, the microorganism has one or more genetic modifications to increase pyruvate dehydrogenase activity. For example, the one or more genetic modifications to increase pyruvate dehydrogenase activity is a modification of aceE or a peptide of 80% or more homology to SEQ ID NO: 172.

[0012] In various embodiments, the increased pyruvate dehydrogenase activity is resistant to inhibition by elevated NADH levels. In addition, the microorganism may be further genetically modified to have reduced alcohol dehydrogenase activity. As an example, the microorganism is genetically modified to have a modification of adhE or a peptide of 80% or more homology to adhE.

[0013] Also disclosed are methods as described herein, wherein the microorganism is further genetically modified to have one or more genetic modifications relating to a metabolic production pathway from malonyl-CoA to the chemical, wherein the pathway uses NADH as a reducing agent and wherein there is a mutation or deletion of an alcohol dehydrogenase gene.

[0014] In various embodiments, the microorganism is further genetically modified to have modified malonyl-coA dependant acetoacetyl-coA synthase activity. For example, the modified malonyl-coA dependant acetoacetyl-coA synthase is npth07 or a peptide of 80% or more homology to npth07.

[0015] In various embodiments, the microorganism is further genetically modified to have altered elongase activity. For example, the microorganism has one or more modifications in the group consisting of elo1, elo2, and elo3, or a peptide of 80% or more homology to a peptide from SEQ ID NOs: 199-201.

[0016] Disclosed herein are methods where acetoacetyl-coA is converted to (S)-3-hydroxybutyryl-coA, (R)-3-hydroxybutyryl-coA, 3-hydroxymethylglutaryl-coA, crotonyl-coA, butyryl-coA, isobutyryl-coA, methacrylyl-coA, or 2-hydroxyisobutyryl-coA. The conversion occurs in one step or the conversion occurs in more than one step. In various methods acetoacetyl-coA is converted to a linear acyl-coA with a chain length from 4-18 carbons.

[0017] In various embodiments, chemicals produced according to the methods disclosed herein are selected from the group consisting of butanol, isobutanol, 3-hydroxypropionic acid, methacrylic acid, 2-hydroxyisobutyrate, butyrate, isobutyrate, acetoacetate, polyhydroxybutyrate, (S)-3-hydroxybutyrate, (R)-3-hydroxybutyrate, mevalonate, an isoprenoid, a fatty acid, a fatty aldehyde, a fatty alcohol, a fatty acid ester, phloroglucinol, resorcinol, an alkylresorcinol, tetracycline, erythromycin, avermectin, macrolides, Vancomycin-group antibiotics, and Type II polyketides. Preferably, the chemical is produced at a concentration higher than a concentration of said chemical produced by a wild type microorganism.

[0018] Also disclosed herein are methods for producing a C4-C18 fatty acid, said methods comprising combining a carbon source, a microorganism, and a cell culture to produce the C4-C18 fatty acid, wherein a) said cell culture comprises an inhibitor of fatty acid synthase and/or the microorganism is genetically modified for reduced enzymatic activity in at least one of the microorganism's native fatty acid synthase pathway enzymes, providing for reduced conversion of malonyl-CoA to fatty acyl-ACPs; and b) the microorganism additionally has one or more genetic modifications increasing fatty acid production. The C4-C18 fatty acid may be selected from the group consisting of C4, C6, C8, C10, C12, C14, C16 and C18 fatty acids. An additional step comprises isolating a C4-C18 fatty acid from said cell culture. In various embodiments, the microorganism synthesizes fatty acyl-coAs of 4-18 carbon chain length. Preferably, the microorganism expresses at least one heterologous elongase enzyme. The elongase enzyme may be a peptide with a sequence corresponding to the group consisting of elo1, elo2, and elo3, or a peptide of 80% or more homology to a peptide from SEQ ID NOs: 199-201.

[0019] Also disclosed herein are genetically modified microorganisms for use according to any of the methods described herein. The microorganisms may be yeast or bacteria. In various embodiments, the microorganism is E. coli.

[0020] Microorganisms comprising a sequence selected from the group consisting of SEQ ID NO: 1-215 or a sequence of 80% or more homology to SEQ ID NO: 1-215 are disclosed. Further disclosed are geneically modified microorganisms comprising at least one, two, three, four, five, six, seven, eight, nine, ten, or more sequences selected from group consisting of SEQ ID NO: 1-215 or sequences of 80% or more homology to SEQ ID NO: 1-215. In addition, microorganisms further genetically modified to induce enzyme expression from the yibD gene promoter with a decreased environmental phosphate concentration are disclosed. In various emdobiments, the microorganism is further genetically modified to maintain plasmids with expression of a gapA gene on the plasmid and a deletion of the gapA gene in the chromosome.

[0021] In various embodiments, microorganisms as described herein have a genotype with 10, 11, 12, 13, 14, 15, or more features selected from the group consisting of F-, Δ(araD-araB)567, ΔlacZ4787(::rrnB-3), LAM-, rph-1, Δ(rhaD-rhaB)568, hsdR514, ΔldhA:frt, ΔpflB:frt, ΔmgsA:frt, ΔpoxB:frt, Δpta-ack:frt, fabIts (S241F)-zeoR, fabB(ts), ΔfabF:frt, coaA*, fabD(ts), and ΔaceBAK:frt.

[0022] In various embodiments, microorganisms as described herein have a genotype with 10, 11, 12, 13, 14, 15, or more features selected from the group consisting of F-, Δ(araD-araB)567, ΔlacZ4787(::rrnB-3), LAM-, rph-1, Δ(rhaD-rhaB)568, hsdR514, ΔldhA:frt, ΔpflB:frt, ΔmgsA:frt, ΔpoxB:frt, Δpta-ack:frt, fabI(ts)-(S241F)-zeoR, fabB(ts)-(A329V), ΔfabF:frt, coaA(R106A), fabD(ts)-(W257Q), ΔlacI:frt, ΔpuuC::T5-aceEF-lpd(E354K):loxP, ΔaceBAK:frt, lpd(E354K):loxP, ΔaldB:PyibD-T7pol:loxP, ΔadhE:frt, ΔaldA:cscBKA.

[0023] In various embodiments, the present invention provides for production of 3HP in cell culture with a plamid containing one or more genes as described herein. Accordingly, a mixture of 3HP and cell culture is disclosed, as well as mixtures of 3HP and cellular debris including plasmids or vectors containing such genes and genetic material.

### BRIEF DESCRIPTION OF DRAWINGS

[0024] The novel features of the invention are set forth with particularity in the claims. A better understanding of the features and advantages of the present invention will be obtained by reference to the following detailed description that sets forth illustrative embodiments, in which the principles of the invention are utilized, and the accompanying drawings of which

[0025] FIG. 1 Enzymatic conversion steps involved in production of malonyl-CoA.

[0026] FIG. 2A Metabolic pathways for production and utilization of malonyl-CoA.

[0027] FIG. 2B A fatty acid biosynthesis initiation pathway.

[0028] FIG. 2C Two fatty acid biosynthesis initiation pathways.

[0029] FIG. 2D Superpathyway of fatty acid biosynthesis initiation (E. coli).

[0030] FIG. 3 Chemicals into which 3-HP may be converted for further commercial use.

[0031] FIGS. 4A-D Pathway involving production of coenzyme A.

[0032] FIG. 5 Chemical products produced from malonyl-CoA.

[0033] FIG. 6 Pathways toward production of fatty acid methyl esters.

[0034] FIG. 7 Pathways toward production of butanol and isobutanol.

[0035] FIG. 8 Flaviolin asorbance at 24 hrs for FAS (Fatty Acid Synthesis pathway) mutants having a plasmid Ptrc-THNS comprising a nucleic acid sequence encoding THN synthase. Numbers along X-axis refer to strains.

[0036] FIG. 93-HP Production by FAS mutant strains.

[0037] FIG. 10A Growth of FAS mutant strains.

[0038] FIG. 10B Productivity of FAS mutant strains.

[0039] FIG. 11 Additional 3-HP Production of FAS mutants.

[0040] FIG. 12 Additional growth results of FAS mutants.

[0041] FIG. 13 Additional Specific Productivity results of FAS mutants.

[0042] FIG. 14 Flaviolin Absorbance results at 24 hours for FAS and CoA mutants

[0043] FIG. 15: Plasmid Map 1: Original pTrc-ptrc-MCR

[0044] FIG. 16: Plasmid Map 2: pIDTSMART-PyibD. Synthesized by Integrated DNA Technologies.

[0045] FIG. 17: Plasmid Map 3: New MCR construct. pTRC-PyibD-mcr (low phosphate induction) (SEQ ID NO:170).

[0046] FIG. 18: mcr activity for PyibD-mcr measured at variable phosphate levels

[0047] FIG. 19. Pyruvate dehydrogenase activity for various strains. FIG. 19 shows that strains expressing one or two copies of the mutated lpdA gene (E354K) are less sensitive to inhibition by NADH compared to the wild type strains (BX775).

[0048] FIG. 20. Effect of NADH inhibition on pyruvate dehydrogenase activity.

[0049] FIG. 21. Growth profiles of 535 and 536 biocatalysts in fermentors

[0050] FIG. 22. 3-HP production from sucrose

[0051] FIG. 23. Plasmid Map 4: pACYC-T7-rbs accADBC

[0052] FIG. 24. Plasmid Map 5: map of pACYC-pyibD-rbsaccADBC

[0053] FIG. 25 shows increased ACCase activity for various strains.

[0054] FIG. 26 shows glutmate dehydrogenase activity for strains with altered glutamate biosynthesis capabilities. In addition to the specific activity measurements, cultures grown at 30 degrees Celsius and shifted to 37 degree Celsius were also evaluated for their glutamate levels and there glutamine levels, a product derived from glutamate. Glutamate and glutamine levels can be determined in g/L using appropriate sensors such as those from YSI Incorporated using the manufactures instructions. Each sample was measured in triplicate. The glutamate and glutamine results are shown in FIGS. 27 and 28. These results show a significant decrease in glutamate and glutamine production from culture with strains carrying the Psychrobacter sp. TAD1 gdh gene alone (853) or the gltB deletion and Psychrobacter sp. TAD1 gdh gene in combination (842) upon shift to 37 Celsius when compared to the parent strain from which these two strains were derived (822).

[0055] FIG. 27: average glutamic acid production for strains with altered glutamate biosynthesis capabilities

[0056] FIG. 28: average glutamine production for strains with altered glutamate biosynthesis capabilities.

[0057] FIG. 29: Average specific productivity of 3-HP for a strain with altered glutamate biosynthesis

[0058] FIG. 30: Biochemical assays of the mcr from Sulfolobus tokodaii specific activity.

[0059] FIG. 31: GC-MS results for in vitro lysate reactions with NADH

[0060] FIG. 32: Flaviolin production measured in E. coli strains with fabI mutations complemented by C. necator fabI homologues

[0061] FIG. 33: elongase metabolic pathway

[0062] FIGS. 34A-C Process of converting biomass to a product.

[0063] FIGS. 35A-B Process of converting biomass to a product.

### DETAILED DESCRIPTION THE INVENTION

[0064] The present invention provides compositions and methods for production of malonyl-CoA derived products from genetically modified microorganisms. The microorganisms described herein have been engineered to increase yields and productivities to desired malonyl-CoA dependent chemical products by reducing carbon flow through native fatty acyl-ACP biosynthesis. More specifically, by reducing flux through native fatty acid synthesis a proportionally greater number of malonyl-CoA molecules are 1) produced and/or 2) converted via the metabolic pathway from malonyl-CoA to the selected chemical product. Disclosed and exemplified herewith are combinations of genetic modifications that are shown to provide unexpectedly elevated increases in productivity of a desired chemical product that is biosynthesized in a host cell with such genetic modifications. It was shown that certain combinations of genetic modifications would result in increased flux through malonyl-CoA, where any single modification alone may be enough to block the competing fatty acid synthesis pathway.

### I. DEFINITIONS

[0065] Definitions and abbreviations are as follows:

[0066] As used in the specification and the claims, the singular forms “a,” “an,” and “the” include plural referents unless the context clearly dictates otherwise. Thus, for example, reference to an “expression vector” includes a single expression vector as well as a plurality of expression vectors, either the same (e.g., the same operon) or different; reference to “microorganism” includes a single microorganism as well as a plurality of microorganisms; and the like.

[0067] “C” means Celsius or degrees Celsius, as is clear from its usage, DCW means dry cell weight, “s” means second(s), “min” means minute(s), “h,” “hr,” or “hrs” means hour(s), “psi” means pounds per square inch, “nm” means nanometers, “d” means day(s), “μL” or “μL” or “ul” means microliter(s), “mL” means milliliter(s), “L” means liter(s), “mm” means millimeter(s), “nm” means nanometers, “mM” means millimolar, “μM” or “uM” means micromolar, “M” means molar, “mmol” means millimole(s), “μmol” or “uMol” means micromole(s)”, “g” means gram(s), “μg” or “ug” means microgram(s) and “ng” means nanogram(s), “PCR” means polymerase chain reaction, “OD” means optical density, “OD₆₀₀ means the optical density measured at a photon wavelength of 600 nm, “kDa” means kilodaltons, “g” means the gravitation constant, “bp” means base pair(s), “kbp” means kilobase pair(s), “% w/v” means weight/volume percent, “% v/v” means volume/volume percent, “IPTG” means isopropyl-μ-D-thiogalactopyranoiside, “RBS” means ribosome binding site, “rpm” means revolutions per minute, “HPLC” means high performance liquid chromatography, and “GC” means gas chromatography. Also, 10̂5 and the like are taken to mean 10⁵ and the like.

[0068] As disclosed herein, “3-HP” and “3HP” means 3-hydroxypropionic acid.

[0069] As used herein, dry cell weight (DCW) for E. coli strains is calculated as 0.41 times the measured OD₆₀₀ value, based on baseline DCW to OD₆₀₀ determinations.

[0070] As used herein, “fatty acid synthase,” whether followed by “pathway,” “system,” or “complex,” is meant to refer to a metabolic pathway, often involving cyclic reactions to biosynthesize fatty acids in a host cell. For example, FIG. 2A depicts a fatty acid synthase pathway common to bacteria. It is noted that this may also be referred to as a “fatty acid synthesis,” a “fatty acid biosynthesis,” (or a “fatty acid synthetase”) “pathway,” “system,” or “complex.”

[0071] As used herein, “reduced enzymatic activity,” “reducing enzymatic activity,” and the like is meant to indicate that a microorganism cell's, or an isolated enzyme, exhibits a lower level of activity than that measured in a comparable cell of the same species or its native enzyme. That is, enzymatic conversion of the indicated substrate(s) to indicated product(s) under known standard conditions for that enzyme is at least 10, at least 20, at least 30, at least 40, at least 50, at least 60, at least 70, at least 80, or at least 90% less than the enzymatic activity for the same biochemical conversion by a native (non-modified) enzyme under a standard specified condition. This term also can include elimination of that enzymatic activity. A cell having reduced enzymatic activity of an enzyme can be identified using any method known in the art. For example, enzyme activity assays can be used to identify cells having reduced enzyme activity (see, for example, Enzyme Nomenclature, Academic Press, Inc., New York, N.Y. 2007).

[0072] The term “reduction” or “to reduce” when used in such phrase and its grammatical equivalents are intended to encompass a complete elimination of such conversion(s).

[0073] The term “heterologous DNA,” “heterologous nucleic acid sequence,” and the like as used herein refers to a nucleic acid sequence wherein at least one of the following is true: (a) the sequence of nucleic acids is foreign to (i.e., not naturally found in) a given host microorganism; (b) the sequence may be naturally found in a given host microorganism, but in an unnatural (e.g., greater than expected) amount; or (c) the sequence of nucleic acids comprises two or more subsequences that are not found in the same relationship to each other in nature. For example, regarding instance (c), a heterologous nucleic acid sequence that is recombinantly produced will have two or more sequences from unrelated genes arranged to make a new functional nucleic acid.

[0074] The term “heterologous” is intended to include the term “exogenous” as the latter term is generally used in the art. With reference to the host microorganism's genome prior to the introduction of a heterologous nucleic acid sequence, the nucleic acid sequence that codes for the enzyme is heterologous (whether or not the heterologous nucleic acid sequence is introduced into that genome).

[0075] By “increase production,” “increase the production,” and like terms is meant to increase the quantity of one or more of enzymes, the enzymatic activity, the enzymatic specificity, and/or the overall flux through an enzymatic conversion step, biosynthetic pathway, or portion of a biosynthetic pathway. A discussion of non-limiting genetic modification techniques is discussed, infra, which may be used either for increasing or decreasing a particular enzyme's quantity, activity, specificity, flux, etc.

[0076] As used herein, the term “gene disruption,” or grammatical equivalents thereof (and including “to disrupt enzymatic function,” “disruption of enzymatic function,” and the like), is intended to mean a genetic modification to a microorganism that renders the encoded gene product as having a reduced polypeptide activity compared with polypeptide activity in or from a microorganism cell not so modified. The genetic modification can be, for example, deletion of the entire gene, deletion or other modification of a regulatory sequence required for transcription or translation, deletion of a portion of the gene which results in a truncated gene product (e.g., enzyme) or by any of various mutation strategies that reduces activity (including to no detectable activity level) the encoded gene product. A disruption may broadly include a deletion of all or part of the nucleic acid sequence encoding the enzyme, and also includes, but is not limited to other types of genetic modifications, e.g., introduction of stop codons, frame shift mutations, introduction or removal of portions of the gene, and introduction of a degradation signal, those genetic modifications affecting mRNA transcription levels and/or stability, and altering the promoter or repressor upstream of the gene encoding the enzyme.

[0077] In various contexts, a gene disruption is taken to mean any genetic modification to the DNA, mRNA encoded from the DNA, and the corresponding amino acid sequence that results in reduced polypeptide activity. Many different methods can be used to make a cell having reduced polypeptide activity. For example, a cell can be engineered to have a disrupted regulatory sequence or polypeptide-encoding sequence using common mutagenesis or knock-out technology (see, e.g., Methods in Yeast Genetics (1997 edition), Adams et al., Cold Spring Harbor Press (1998)). One particularly useful method of gene disruption is complete gene deletion because it reduces or eliminates the occurrence of genetic reversions in the genetically modified microorganisms of the invention. Accordingly, a disruption of a gene whose product is an enzyme thereby disrupts enzymatic function. Alternatively, antisense technology can be used to reduce the activity of a particular polypeptide. For example, a cell can be engineered to contain an eDNA that encodes an antisense molecule that prevents a polypeptide from being translated. Further, gene silencing can be used to reduce the activity of a particular polypeptide.

[0078] The term “antisense molecule” as used herein encompasses any nucleic acid molecule or nucleic acid analog (e.g., peptide nucleic acids) that contains a sequence that corresponds to the coding strand of an endogenous polypeptide. An antisense molecule also can have flanking sequences (e.g., regulatory sequences). Thus, antisense molecules can be ribozymes or antisense oligonucleotides.

[0079] As used herein, a ribozyme can have any general structure including, without limitation, hairpin, hammerhead, or axhead structures, provided the molecule cleaves RNA.

[0080] Bio-production, as used herein, may be aerobic, microaerobic, or anaerobic.

[0081] As used herein, the language “sufficiently identical” refers to proteins or portions thereof that have amino acid sequences that include a minimum number of identical or equivalent amino acid residues when compared to an amino acid sequence of the amino acid sequences provided in this application (including the SEQ ID Nos./sequence listings) such that the protein or portion thereof is able to achieve the respective enzymatic reaction and/or other function. To determine whether a particular protein or portion thereof is sufficiently homologous may be determined by an assay of enzymatic activity, such as those commonly known in the art.

[0082] Descriptions and methods for sequence identity and homology are intended to be exemplary and it is recognized that these concepts are well-understood in the art. Further, it is appreciated that nucleic acid sequences may be varied and still encode an enzyme or other polypeptide exhibiting a desired functionality, and such variations are within the scope of the present invention. Also, it is intended that the phrase “equivalents thereof’ is mean to indicate functional equivalents of a referred to gene, enzyme or the like. Such an equivalent may be for the same species or another species, such as another microorganism species.

[0083] Further to nucleic acid sequences, a nucleic acid is “hybridizable” to another nucleic acid when a single stranded form of the nucleic acid can anneal to the other nucleic acid under appropriate conditions of temperature and solution ionic strength. Hybridization and washing conditions are well known and exemplified in Sambrook (1989), supra, (see in particular Chapters 9 and 11), incorporated by reference to such teachings. Low stringency hybridization conditions correspond to a Tm of 55° C. (for example 5×SSC, 0.1% SDS, 0.25 milk and no formamide or 5×SSC, 0.5% SDS and 30% formamide). Moderate stringency hybridization conditions correspond for example, to Tm of 60° C. (for example 6×SSC, 0.1% SDS, 0.05% milk with or without formamide, and stringent hybridization conditions correspond for example, to a Tm of 65° C. and 0.1×SSC and 0.1% SDS. For various embodiments of the invention a sequence of interest may be hybridizable under any such stringency condition—low, moderate or high.

[0084] The term “identified enzymatic functional variant” means a polypeptide that is determined to possess an enzymatic activity and specificity of an enzyme of interest but which has an amino acid sequence different from such enzyme of interest. A corresponding “variant nucleic acid sequence” may be constructed that is determined to encode such an identified enzymatic functional variant. These may be identified and/or developed from orthologs, paralogs, or nonorthologous gene displacements.

[0085] The use of the phrase “segment of interest” is meant to include both a gene and any other nucleic acid sequence segment of interest. One example of a method used to obtain a segment of interest is to acquire a culture of a microorganism, where that microorganism's genome includes the gene or nucleic acid sequence segment of interest.

[0086] When the genetic modification of a gene product, i.e., an enzyme, is referred to herein, including the claims, it is understood that the genetic modification is of a nucleic acid sequence, such as or including the gene, that normally encodes the stated gene product, i.e., the enzyme.

[0087] By “means for modulating” the conversion of malonyl-CoA to fatty acyl-ACP or fatty acyl-coA molecules, and to fatty acid molecules, is meant any one of the following: 1) providing in a microorganism cell at least one polynucleotide that encodes at least one polypeptide having activity of one of the fatty acid synthase system enzymes (such as recited herein), wherein the polypeptide so encoded has (such as by mutation and/or promoter substitution, etc., to lower enzymatic activity), or may be modulated to have (such as by temperature sensitivity, inducible promoter, etc.) a reduced enzymatic activity; 2) providing to a vessel comprising a microorganism cell or population an inhibitor that inhibits enzymatic activity of one or more of the fatty acid synthase system enzymes (such as recited herein), at a dosage effective to reduce enzymatic activity of one or more of these enzymes. These means may be provided in combination with one another. When a means for modulating involves a conversion, during a fermentation event, from a higher to a lower activity of the fatty acid synthetase system, such as by increasing temperature of a culture vessel comprising a population of genetically modified microorganism comprising a temperature-sensitive fatty acid synthetase system polypeptide (e.g., enoyl-ACP reductase), or by adding an inhibitor, there are conceived two modes—one during which there is higher activity, and a second during which there is lower activity, of such fatty acid synthetase system. During the lower activity mode, a shift to greater utilization of malonyl-CoA to a selected chemical product may proceed.

[0088] “CoA” means coenzyme-A, and “mcr” means malonyl-CoA reductase.

[0089] A “temperature-sensitive mutation” or “(ts)” refers to a modified gene product that can be induced to express the modified RNA at specific temperature.

### II. ORGANISMS

[0090] Features as described and claimed herein may be provided in a microorganism selected from the listing herein, or another suitable microorganism, that also comprises one or more natural, introduced, or enhanced chemical product biosynthesis pathway. Thus, in some embodiments the microorganism comprises an endogenous chemical product biosynthesis pathway (which may, in some such embodiments, be enhanced), whereas in other embodiments the microorganism does not comprise an endogenous biosynthesis pathway for the selected chemical product.

[0091] Varieties of these genetically modified microorganisms may comprise genetic modifications and/or other system alterations as may be described in other patent applications of one or more of the present inventor(s) and/or subject to assignment or license to the owner of the present patent application.

[0092] The examples describe specific modifications and evaluations to certain bacterial and yeast microorganisms. The scope of the invention is not meant to be limited to such species, but to be generally applicable to a wide range of suitable microorganisms. Generally, a microorganism used for the present invention may be selected from bacteria, cyanobacteria, filamentous fungi and yeasts.

[0093] For some embodiments, microbial hosts initially selected for a selected chemical product biosynthesis should also utilize sugars including glucose at a high rate. Most microbes are capable of utilizing carbohydrates. However, certain environmental microbes cannot utilize carbohydrates to high efficiency, and therefore would not be suitable hosts for such embodiments that are intended for glucose or other carbohydrates as the principal added carbon source.

[0094] As the genomes of various species become known, the present invention easily may be applied to an ever-increasing range of suitable microorganisms. Further, given the relatively low cost of genetic sequencing, the genetic sequence of a species of interest may readily be determined to make application of aspects of the present invention more readily obtainable (based on the ease of application of genetic modifications to an organism having a known genomic sequence). Public database sites, such as <<www.metacyc.org>>, <<www.ecocyc.org>>, <<www.biocyc.org>>, and <<www.ncbi.gov>>, <<htpp://www.nchi.nlm.nih.gov/>> have various genetic and genomic information and associated tools to identify enzymes in various species that have desired function or that may be modified to achieve such desired function.

[0095] More particularly, based on the various criteria described herein, suitable microbial hosts for the biosynthesis of a chemical product generally may include, but are not limited to, any gram negative organisms, more particularly a member of the family Enterobacteriaceae, such as E. coli, or Oligotropha carboxidovorans, or Pseudomononas sp.; any gram positive microorganism, for example Bacillus subtilis, Lactobaccilus sp. or Lactococcus sp.; a yeast, for example Saccharomyces cerevisiae, Pichia pastoris or Pichia stipitis; and other groups or microbial species including those found in Actinomycetes (also referred to as Actinobacteria). More particularly, suitable microbial hosts for the biosynthesis of a chemical product generally include, but are not limited to, members of the genera Clostridium, Zymomonas, Escherichia, Salmonella, Rhodococcus, Pseudomonas, Bacillus, Lactobacillus, Enterococcus, Alcaligenes, Klebsiella, Paenibacillus, Arthrobacter, Corynebacterium, Brevibacterium, Pichia, Candida, Hansenula and Saccharomyces. Hosts that may be particularly of interest include: Oligotropha carboxidovorans (such as strain OMS), Escherichia coli, Alcaligenes eutrophus (Cupriavidus necator), Bacillus licheniformis, Paenibacillus macerans, Rhodococcus erythropolis, Pseudomonas putida, Lactobacillus plantarum, Enterococcus faecium, Enterococcus gallinarium, Enterococcus faecalis, Bacillus subtilis and Saccharomyces cerevisiae.

[0096] More particularly, suitable microbial hosts for the biosynthesis of selected chemical products generally include, but are not limited to, members of the genera Clostridium, Zymomonas, Escherichia, Salmonella, Rhodococcus, Pseudomonas, Bacillus, Lactobacillus, Enterococcus, Alcaligenes, Klebsiella, Paenibacillus, Arthrobacter, Corynebacterium, Brevibacterium, Pichia, Candida, Hansenula and Saccharomyces.

[0097] Hosts that may be particularly of interest include: Oligotropha carboxidovorans (such as strain 0M5T), Escherichia coli, Alcaligenes eutrophus (Cupriavidus necator), Bacillus licheniformis, Paenibacillus macerans, Rhodococcus erythropolis, Pseudomonas putida, Lactobacillus plantarum, Enterococcus faecium, Enterococcus gallinarium, Enterococcus faecalis, Bacillus subtilis and Saccharomyces cerevisiae. Also, any of the known strains of these species may be utilized as a starting microorganism, as may any of the following species including respective strains thereof. Cupriavidus basilensis, Cupriavidus campinensis, Cupriavidus gilardi, Cupriavidus laharsis, Cupriavidus metallidurans, Cupriavidus oxalaticus, Cupriavidus pauculus, Cupriavidus pinatubonensis, Cupriavidus respiraculi, and Cupriavidus taiwanensis.

[0098] In some embodiments, the recombinant microorganism is a gram-negative bacterium. In some embodiments, the recombinant microorganism is selected from the genera Zymomonas, Escherichia, Pseudomonas, Alcaligenes, and Klebsiella. In some embodiments, the recombinant microorganism is selected from the species Escherichia coli, Cupriavidus necator, Oligotropha carboxidovorans, and Pseudomonas putida. In some embodiments, the recombinant microorganism is an E. coli strain.

[0099] In some embodiments, the recombinant microorganism is a gram-positive bacterium. In some embodiments, the recombinant microorganism is selected from the genera Clostridium, Salmonella, Rhodococcus, Bacillus, Lactobacillus, Enterococcus, Paenibacillus, Arthrobacter, Corynebacterium, and Brevibacterium. In some embodiments, the recombinant microorganism is selected from the species Bacillus licheniformis, Paenibacillus macerans, Rhodococcus erythropolis, Lactobacillus plantarum, Enterococcus faecium, Enterococcus gallinarium, Enterococcus faecalis, and Bacillus subtilis. In particular embodiments, the recombinant microorganism is a B. subtilis strain.

[0100] In some embodiments, the recombinant microorganism is a yeast. In some embodiments, the recombinant microorganism is selected from the genera Pichia, Candida, Hansenula and Saccharomyces. In particular embodiments, the recombinant microorganism is Saccharomyces cerevisiae.

[0101] The ability to genetically modify the host is essential for the production of any recombinant microorganism. The mode of gene transfer technology may be by electroporation, conjugation, transduction or natural transformation. A broad range of host conjugative plasmids and drug resistance markers are available. The cloning vectors are tailored to the host organisms based on the nature of antibiotic resistance markers that can function in that host.

### III. CARBON SOURCES/GROWTH MEDIA/BIOREACTORS

[0102] Carbon Sources

[0103] Bio-production media, which is used in the present invention with recombinant microorganisms having a biosynthetic pathway for 3-HP, must contain suitable carbon sources or substrates for the intended metabolic pathways. Suitable substrates may include, but are not limited to, monosaccharides such as glucose and fructose, oligosaccharides such as lactose or sucrose, polysaccharides such as starch or cellulose or mixtures thereof and unpurified mixtures from renewable feedstocks such as cheese whey permeate, cornsteep liquor, sugar beet molasses, and barley malt. Additionally the carbon substrate may also be one-carbon substrates such as carbon dioxide, carbon monoxide, or methanol for which metabolic conversion into key biochemical intermediates has been demonstrated. In addition to one and two carbon substrates methylotrophic organisms are also known to utilize a number of other carbon containing compounds such as methylamine, glucosamine and a variety of amino acids for metabolic activity.

[0104] Although it is contemplated that all of the above mentioned carbon substrates and mixtures thereof are suitable in the present invention as a carbon source, common carbon substrates used as carbon sources are glucose, fructose, and sucrose, as well as mixtures of any of these sugars. Other suitable substrates include xylose, arabinose, other cellulose-based C-5 sugars, high-fructose corn syrup, and various other sugars and sugar mixtures as are available commercially. Sucrose may be obtained from feedstocks such as sugar cane, sugar beets, cassava, bananas or other fruit, and sweet sorghum. Glucose and dextrose may be obtained through saccharification of starch based feedstocks including grains such as corn, wheat, rye, barley, and oats. Also, in some embodiments all or a portion of the carbon source may be glycerol. Alternatively, glycerol may be excluded as an added carbon source.

[0105] In one embodiment, the carbon source is selected from glucose, fructose, sucrose, dextrose, lactose, glycerol, and mixtures thereof. Variously, the amount of these components in the carbon source may be greater than about 50%, greater than about 60%, greater than about 70%, greater than about 80%, greater than about 90%, or more, up to 100% or essentially 100% of the carbon source.

[0106] In addition, methylotrophic organisms are known to utilize a number of other carbon containing compounds such as methylamine, glucosamine and a variety of amino acids for metabolic activity. For example, methylotrophic yeast are known to utilize the carbon from methylamine to form trehalose or glycerol (Bellion et al., Microb. Growth Cl Compd. (Int. Symp.), 7th (1993), 415-32. Editor(s): Murrell, J. Collin; Kelly, Don P. Publisher: Intercept, Andover, UK). Similarly, various species of Candida will metabolize alanine or oleic acid (Sulter et al., Arch. Microbiol. 153:485-489 (1990)). Hence it is contemplated that the source of carbon utilized in embodiments of the present invention may encompass a wide variety of carbon-containing substrates.

[0107] In addition, fermentable sugars may be obtained from cellulosic and lignocellulosic biomass through processes of pretreatment and saccharification, as described, for example, in U.S. Patent Publication No. 2007/0031918A1, which is herein incorporated by reference. Biomass refers to any cellulosic or lignocellulosic material and includes materials comprising cellulose, and optionally further comprising hemicellulose, lignin, starch, oligosaccharides and/or monosaccharides. Biomass may also comprise additional components, such as protein and/or lipid. Biomass may be derived from a single source, or biomass can comprise a mixture derived from more than one source; for example, biomass could comprise a mixture of corn cobs and corn stover, or a mixture of grass and leaves. Biomass includes, but is not limited to, bioenergy crops, agricultural residues, municipal solid waste, industrial solid waste, sludge from paper manufacture, yard waste, wood and forestry waste. Examples of biomass include, but are not limited to, corn grain, corn cobs, crop residues such as corn husks, corn stover, grasses, wheat, wheat straw, barley, barley straw, hay, rice straw, switchgrass, waste paper, sugar cane bagasse, sorghum, soy, components obtained from milling of grains, trees, branches, roots, leaves, wood chips, sawdust, shrubs and bushes, vegetables, fruits, flowers and animal manure. Any such biomass may be used in a bio-production method or system to provide a carbon source. Various approaches to breaking down cellulosic biomass to mixtures of more available and utilizable carbon molecules, including sugars, include: heating in the presence of concentrated or dilute acid (e.g., <1% sulfuric acid); treating with ammonia; treatment with ionic salts; enzymatic degradation; and combinations of these. These methods normally follow mechanical separation and milling, and are followed by appropriate separation processes.

[0108] In various embodiments, any of a wide range of sugars, including, but not limited to sucrose, glucose, xylose, cellulose or hemicellulose, are provided to a microorganism, such as in an industrial system comprising a reactor vessel in which a defined media (such as a minimal salts media including but not limited to M9 minimal media, potassium sulfate minimal media, yeast synthetic minimal media and many others or variations of these), an inoculum of a microorganism providing one or more of the 3-HP biosynthetic pathway alternatives, and the a carbon source may be combined. The carbon source enters the cell and is cataboliized by well-known and common metabolic pathways to yield common metabolic intermediates, including phosphoenolpyruvate (PEP). (See Molecular Biology of the Cell, 3rd Ed., B. Alberts et al. Garland Publishing, New York, 1994, pp. 42-45, 66-74, incorporated by reference for the teachings of basic metabolic catabolic pathways for sugars; Principles of Biochemistry, 3rd Ed., D. L. Nelson & M. M. Cox, Worth Publishers, New York, 2000, pp 527-658, incorporated by reference for the teachings of major metabolic pathways; and Biochemistry, 4th Ed., L. Stryer, W. H. Freeman and Co., New York, 1995, pp. 463-650, also incorporated by reference for the teachings of major metabolic pathways.)

[0109] Bio-based carbon can be distinguished from petroleum-based carbon according to a variety of methods, including without limitation ASTM D6866, or various other techniques. For example, carbon-14 and carbon-12 ratios differ in bio-based carbon sources versus petroleum-based sources, where higher carbon-14 ratios are found in bio-based carbon sources. In various embodiments, the carbon source is not petroleum-based, or is not predominantly petroleum based. In various embodiments, the carbon source is greater than about 50% non-petroleum based, greater than about 60% non-petroleum based, greater than about 70% non-petroleum based, greater than about 80% non-petroleum based, greater than about 90% non-petroleum based, or more. In various embodiments, the carbon source has a carbon-14 to carbon-12 ratio of about 1.0×10-14 or greater.

[0110] Various components may be excluded from the carbon source. For example, in some embodiments, acrylic acid, 1,4-butanediol, and/or glycerol are excluded or essentially excluded from the carbon source. As such, the carbon source according to some embodiments of the invention may be less than about 50% glycerol, less than about 40% glycerol, less than about 30% glycerol, less than about 20% glycerol, less than about 10% glycerol, less than about 5% glycerol, less than about 1% glycerol, or less. For example, the carbon source may be essentially glycerol-free. By essentially glycerol-free is meant that any glycerol that may be present in a residual amount does not contribute substantially to the production of the target chemical compound.

### Growth Media

[0111] In addition to an appropriate carbon source, such as selected from one of the herein-disclosed types, bio-production media must contain suitable minerals, salts, cofactors, buffers and other components, known to those skilled in the art, suitable for the growth of the cultures and promotion of the enzymatic pathway necessary for 3-HP production, or other products made under the present invention.

[0112] Another aspect of the invention regards media and culture conditions that comprise genetically modified microorganisms of the invention and optionally supplements.

[0113] Typically cells are grown at a temperature in the range of about 25° C. to about 40° C. in an appropriate medium, as well as up to 70° C. for thermophilic microorganisms. Suitable growth media in the present invention are common commercially prepared media such as Luria Bertani (LB) broth, M9 minimal media, Sabouraud Dextrose (SD) broth, Yeast medium (YM) broth, (Ymin) yeast synthetic minimal media, and minimal media as described herein, such as M9 minimal media. Other defined or synthetic growth media may also be used, and the appropriate medium for growth of the particular microorganism will be known by one skilled in the art of microbiology or bio-production science. In various embodiments a minimal media may be developed and used that does not comprise, or that has a low level of addition of various components, for example less than 10, 5, 2 or 1 g/L of a complex nitrogen source including but not limited to yeast extract, peptone, tryptone, soy flour, corn steep liquor, or casein. These minimal medias may also have limited supplementation of vitamin mixtures including biotin, vitamin B12 and derivatives of vitamin B12, thiamin, pantothenate and other vitamins. Minimal medias may also have limited simple inorganic nutrient sources containing less than 28, 17, or 2.5 mM phosphate, less than 25 or 4 mM sulfate, and less than 130 or 50 mM total nitrogen.

[0114] Bio-production media, which is used in embodiments of the present invention with genetically modified microorganisms, must contain suitable carbon substrates for the intended metabolic pathways. As described hereinbefore, suitable carbon substrates include carbon monoxide, carbon dioxide, and various monomeric and oligomeric sugars.

[0115] Suitable pH ranges for the bio-production are between pH 3.0 to pH 10.0, where pH 6.0 to pH 8.0 is a typical pH range for the initial condition. However, the actual culture conditions for a particular embodiment are not meant to be limited by these pH ranges.

[0116] Bio-productions may be performed under aerobic, microaerobic, or anaerobic conditions, with or without agitation.

[0117] Bioreactors

[0118] Fermentation systems utilizing methods and/or compositions according to the invention are also within the scope of the invention.

[0119] Any of the recombinant microorganisms as described and/or referred to herein may be introduced into an industrial bio-production system where the microorganisms convert a carbon source into a selected chemical product, such as 3-HP or a polyketide such as described herein (including in priority document(s)), in a commercially viable operation. The bio-production system includes the introduction of such a recombinant microorganism into a bioreactor vessel, with a carbon source substrate and bio-production media suitable for growing the recombinant microorganism, and maintaining the bio-production system within a suitable temperature range (and dissolved oxygen concentration range if the reaction is aerobic or microaerobic) for a suitable time to obtain a desired conversion of a portion of the substrate molecules to 3-HP. Industrial bio-production systems and their operation are well-known to those skilled in the arts of chemical engineering and bioprocess engineering.

[0120] Bio-productions may be performed under aerobic, microaerobic, or anaerobic conditions, with or without agitation. The operation of cultures and populations of microorganisms to achieve aerobic, microaerobic and anaerobic conditions are known in the art, and dissolved oxygen levels of a liquid culture comprising a nutrient media and such microorganism populations may be monitored to maintain or confirm a desired aerobic, microaerobic or anaerobic condition. When syngas is used as a feedstock, aerobic, microaerobic, or anaerobic conditions may be utilized. When sugars are used, anaerobic, aerobic or microaerobic conditions can be implemented in various embodiments.

[0121] Any of the recombinant microorganisms as described and/or referred to herein may be introduced into an industrial bio-production system where the microorganisms convert a carbon source into 3-HP, and optionally in various embodiments also to one or more downstream compounds of 3-HP in a commercially viable operation. The bio-production system includes the introduction of such a recombinant microorganism into a bioreactor vessel, with a carbon source substrate and bio-production media suitable for growing the recombinant microorganism, and maintaining the bio-production system within a suitable temperature range (and dissolved oxygen concentration range if the reaction is aerobic or microaerobic) for a suitable time to obtain a desired conversion of a portion of the substrate molecules to 3-HP.

[0122] In various embodiments, syngas components or sugars are provided to a microorganism, such as in an industrial system comprising a reactor vessel in which a defined media (such as a minimal salts media including but not limited to M9 minimal media, potassium sulfate minimal media, yeast synthetic minimal media and many others or variations of these), an inoculum of a microorganism providing an embodiment of the biosynthetic pathway(s) taught herein, and the carbon source may be combined. The carbon source enters the cell and is catabolized by well-known and common metabolic pathways to yield common metabolic intermediates, including phosphoenolpyruvate (PEP). (See Molecular Biology of the Cell, 3rd Ed., B. Alberts et al. Garland Publishing, New York, 1994, pp. 42-45, 66-74, incorporated by reference for the teachings of basic metabolic catabolic pathways for sugars; Principles of Biochemistry, 3'd Ed., D. L. Nelson & M. M. Cox, Worth Publishers, New York, 2000, pp. 527-658, incorporated by reference for the teachings of major metabolic pathways; and Biochemistry, 4th Ed., L. Stryer, W. H. Freeman and Co., New York, 1995, pp. 463-650, also incorporated by reference for the teachings of major metabolic pathways.).

[0123] Further to types of industrial bio-production, various embodiments of the present invention may employ a batch type of industrial bioreactor. A classical batch bioreactor system is considered “closed” meaning that the composition of the medium is established at the beginning of a respective bio-production event and not subject to artificial alterations and additions during the time period ending substantially with the end of the bio-production event. Thus, at the beginning of the bio-production event the medium is inoculated with the desired organism or organisms, and bio-production is permitted to occur without adding anything to the system. Typically, however, a “batch” type of bio-production event is batch with respect to the addition of carbon source and attempts are often made at controlling factors such as pH and oxygen concentration. In batch systems the metabolite and biomass compositions of the system change constantly up to the time the bio [symbol] production event is stopped. Within batch cultures cells moderate through a static lag phase to a high growth log phase and finally to a stationary phase where growth rate is diminished or halted. If untreated, cells in the stationary phase will eventually die. Cells in log phase generally are responsible for the bulk of production of a desired end product or intermediate.

[0124] A variation on the standard batch system is the fed-batch system. Fed-batch bio-production processes are also suitable in the present invention and comprise a typical batch system with the exception that the nutrients, including the substrate, are added in increments as the bio-production progresses. Fed-Batch systems are useful when catabolite repression is apt to inhibit the metabolism of the cells and where it is desirable to have limited amounts of substrate in the media. Measurement of the actual nutrient concentration in Fed-Batch systems may be measured directly, such as by sample analysis at different times, or estimated on the basis of the changes of measurable factors such as pH, dissolved oxygen and the partial pressure of waste gases such as CO2. Batch and fed-batch approaches are common and well known in the art and examples may be found in Thomas D. Brock in Biotechnology: A Textbook of Industrial Microbiology, Second Edition (1989) Sinauer Associates, Inc., Sunderland, Mass., Deshpande, Mukund V., Appl. Biochem. Biotechnol., 36:227, (1992), and Biochemical Engineering Fundamentals, 2'd Ed. J. E. Bailey and D. F. 011 is, McGraw Hill, New York, 1986, herein incorporated by reference for general instruction on bio-production.

[0125] Although embodiments of the present invention may be performed in batch mode, or in fed-batch mode, it is contemplated that the invention would be adaptable to continuous bio-production methods. Continuous bio-production is considered an “open” system where a defined bio-production medium is added continuously to a bioreactor and an equal amount of conditioned media is removed simultaneously for processing. Continuous bio-production generally maintains the cultures within a controlled density range where cells are primarily in log phase growth. Two types of continuous bioreactor operation include a chemostat, wherein fresh media is fed to the vessel while simultaneously removing an equal rate of the vessel contents. The limitation of this approach is that cells are lost and high cell density generally is not achievable. In fact, typically one can obtain much higher cell density with a fed-batch process. Another continuous bioreactor utilizes perfusion culture, which is similar to the chemostat approach except that the stream that is removed from the vessel is subjected to a separation technique which recycles viable cells back to the vessel. This type of continuous bioreactor operation has been shown to yield significantly higher cell densities than fed-batch and can be operated continuously. Continuous bio-production is particularly advantageous for industrial operations because it has less down time associated with draining, cleaning and preparing the equipment for the next bio-production event. Furthermore, it is typically more economical to continuously operate downstream unit operations, such as distillation, than to run them in batch mode.

[0126] Continuous bio-production allows for the modulation of one factor or any number of factors that affect cell growth or end product concentration. For example, one method will maintain a limiting nutrient such as the carbon source or nitrogen level at a fixed rate and allow all other parameters to moderate. In other systems a number of factors affecting growth can be altered continuously while the cell concentration, measured by media turbidity, is kept constant. Methods of modulating nutrients and growth factors for continuous bio-production processes as well as techniques for maximizing the rate of product formation are well known in the art of industrial microbiology and a variety of methods are detailed by Brock, supra.

[0127] It is contemplated that embodiments of the present invention may be practiced using either batch, fed-batch or continuous processes and that any known mode of bio-production would be suitable. It is contemplated that cells may be immobilized on an inert scaffold as whole cell catalysts and subjected to suitable bio-production conditions for 3-HP production, or be cultured in liquid media in a vessel, such as a culture vessel. Thus, embodiments used in such processes, and in bio-production systems using these processes, include a population of genetically modified microorganisms of the present invention, a culture system comprising such population in a media comprising nutrients for the population, and methods of making 3-HP and thereafter, a downstream product of 3-HP.

[0128] Embodiments of the invention include methods of making 3-HP in a bio-production system, some of which methods may include obtaining 3-HP after such bio-production event. For example, a method of making 3-HP may comprise: providing to a culture vessel a media comprising suitable nutrients; providing to the culture vessel an inoculum of a genetically modified microorganism comprising genetic modifications described herein such that the microorganism produces 3-HP from syngas and/or a sugar molecule; and maintaining the culture vessel under suitable conditions for the genetically modified microorganism to produce 3-HP.

[0129] Also, it is within the scope of the present invention to produce, and to utilize in bio-production methods and systems, including industrial bio-production systems for production of a selected chemical product (chemical), a recombinant microorganism genetically engineered to modify one or more aspects effective to increase chemical product bio-production by at least 20 percent over control microorganism lacking the one or more modifications.

[0130] In various embodiments, the invention is directed to a system for bio-production of a chemical product as described herein, said system comprising: a fermentation tank suitable for microorganism cell culture; a line for discharging contents from the fermentation tank to an extraction and/or separation vessel; and an extraction and/or separation vessel suitable for removal of the chemical product from cell culture waste. In various embodiments, the system includes one or more pre-fermentation tanks, distillation columns, centrifuge vessels, back extraction columns, mixing vessels, or combinations thereof.

[0131] The following published resources are incorporated by reference herein for their respective teachings to indicate the level of skill in these relevant arts, and as needed to support a disclosure that teaches how to make and use methods of industrial bio-production of 3-HP, or other product(s) produced under the invention, from sugar sources, and also industrial systems that may be used to achieve such conversion with any of the recombinant microorganisms of the present invention (Biochemical Engineering Fundamentals, 2nd Ed. J. E. Bailey and D. F. 011is, McGraw Hill, New York, 1986, entire book for purposes indicated and Chapter 9, pages 533-657 in particular for biological reactor design; Unit Operations of Chemical Engineering, 5th Ed., W. L. McCabe et al., McGraw Hill, New York 1993, entire book for purposes indicated, and particularly for process and separation technologies analyses; Equilibrium Staged Separations, P. C. Wankat, Prentice Hall, Englewood Cliffs, N.J. USA, 1988, entire book for separation technologies teachings). Generally, it is appreciated, in view of the disclosure, that any of the above methods and systems may be used for production of various chemical products such as those disclosed herein.

### IV. PRODUCTS

[0132] In various embodiments the compositions, methods and systems of the present invention involve inclusion of a metabolic production pathway that converts malonyl-CoA to a chemical product of interest.

[0133] One chemical product is 3-hydroxypropionic acid (CAS No. 503-66-2, “3-HP”). Chemical products further include tetracycline, erythromycin, avermectin, macrolides, vanomycin-group antibiotics, Type II polyketides, (5R)-carbapenem, 6-methoxymellein, acridone, actinorhodin, aloesone, apigenin, barbaloin, biochanin A, maackiain, medicarpin, cannabinoid, cohumulone, daidzein, flavonoid, formononetin, genistein, humulone, hyperforin, mycolate, olivetol, pelargonidin, pentaketide chromone, pinobanksin, pinosylvin, plumbagin, raspberry ketone, resveratrol, rifamycin B, salvianin, shisonin, sorgoleone, stearate, anthocyanin, ternatin, tetrahydroxyxanthone, usnate, and xanthohumol. Particular polyketide chemical products include 1,3,6,8-tetrahydroxynaphthalene (THN) or its derivative flaviolin (CAS No. 479-05-0). The production of 3-HP, or of THN or flaviolin, may be used herein to demonstrate the features of the invention as they may be applied to other chemical products. Alternatively, any of the above compounds may be excluded from a group of chemical products.

[0134] Numerous products can be made from malonyl-coA precursors alone, by expressing enzyme functions to convert malonyl-coA into products. Several examples of these non-limiting products are shown below in Table 1A. Any of the strains discussed in the specification that increase flux through malonyl-coA can be used to produce these products. Hexaketide pyrone can be made by expressing a hexaketide pyrone synthase from either Aloe arborescens or Plumbago indica. Octaketide 4b pyrone can be made by expressing an octaketide 4b pyrone synthase from Aloe arborescens. Octaketide can be made by expressing an octaketide synthase from Hypericum perforatum. Pentaketide chromone can be made by expressing a pentaketide chromone synthase from Aloe arborescens. 3-hydroxypropionic acid can be made by expressing a malonyl-coA reductase and 3-hydroxypropionic acid dehydrogenase from various sources.

TABLE 1A
Products requiring malonyl-coA precursors alone

| Chemical product | Biosynthesis |
|---|---|
| 3,5,7,9,11,13,15- | 8 malonyl-CoA + a polyketide synthase |
| hepta-oxo- | containing an [acp] domain-> a |
| hexadecanoyl-[PKS | 3,5,7,9,11,13,15-hepta-oxo-hexadecanoyl- |
| acp] | [PKS acp] + 8 CO2 + 8 coenzyme A |
| octoketide 4b | 8 malonyl-CoA + 4 H2 = octoketide 4b + 8 |
| | CO2 + 8 coenzyme A + H2O + H+ |
| octoketide | 8 malonyl-CoA + 4 H2 = octoketide + 8 CO2 + |
| | 8 coenzyme A + H2O + H+ |
| heptaketide pyrone | 7 malonyl-CoA + 4 H2 = heptaketide pyrone + |
| | 7 CO2 + 7 coenzyme A + H2O + 2 H+ |
| hexaketide pyrone | 6 malonyl-CoA + 3 H2 = hexaketide pyrone + 6 |
| | CO2 + 6 coenzyme A + H2O + H+ |
| pentaketide chromone | 5 malonyl-CoA + 5 H+ = 5,7-dihydroxy-2- |
| | methylchromone + 5 CO2 + 5 coenzyme A + |
| | H2O |
| 3-hydroxypropionate | malonyl-CoA + NADPH + H+ = malonate |
| | semialdehyde + NADP+ + coenzyme A |

[0135] Furthermore, numerous polyketide products can be made from malonyl-coA precursors in combination with acetyl-coA precursors. As acetyl-coA is a precursor of malonyl-coA, no additional modifications to a malonyl-coA producing strain are needed. Products can be made by expressing enzyme functions to convert malonyl-coA in addition to acetyl-coA into products. Several examples of these non-limiting products are shown below in Table 1B. Any of the strains discussed in the specification that increase flux through malonyl-coA can be used to produce these products. 6-hydroxymellein can be made by expressing a 6-hydroxymellein synthase from either Aloe or Daucus carota. Aloesone can be made by expressing an aloesone synthase from either Aloe arborescens or Rheum palmatum. Olivetolic acid can be made by expressing an olivetolic acid synthase. Naphthylisoquinoline alkaloid precursor (a precursor to plumbagine) can be made by expressing a polyketide pyrone synthase such as PKS G-11468 from Plumbago indica. 6-methylsalicylate can be made by expressing a 6-methylsalicylate synthase from Penicillium species. Triacetic acid lactone can be made by expressing a triacetic acid lactone synthase.

TABLE 1B
Products requiring malonyl-coA and acetyl-coA precursors

| Chemical product | Biosynthesis |
|---|---|
| 6-hydroxymellein | acetyl-CoA + 4 malonyl-CoA + NADPH + 5 |
| | H+ = 6-hydroxymellein + 4 CO2 + NADP+ + |
| | 5 coenzyme A + H2O |
| aloesone | acetyl-CoA + 6 malonyl-CoA + 6 H+ = |
| | aloesone + 7 CO2 + 7 coenzyme A + H2O |
| olivetolic acid | acetyl-CoA + 5 malonyl-CoA + 12 H+ = |
| (cannabinoid) | olivetolic acid + 5 CO2 + 6 coenzyme A + 2 |
| | H20 |
| plumbagin | acetyl-CoA + 5 malonyl-CoA + 3 H2 + H+ = |
| | naphthylisoquinoline alkaloid precursor + 6 |
| | CO2 + 6 coenzyme A + 2 H20, |
| | acetyl-CoA + 5 malonyl-CoA + 2 H2 = |
| | hexaketide pyrone + 5 CO2 + 6 coenzyme A + |
| | H2 0 |
| 6-methylsalicylate | acetyl-CoA + 3 malonyl-CoA + NADPH + 3 |
| | H+ = 6-methylsalicylate + 3 CO2 + NADP+ + |
| | 4 coenzyme A |
| triacetic acid lactone | acetyl-CoA + 2 malonyl-CoA + H⁺ → triacetic |
| | acid lactone + 2 CO₂ + 3 coenzyme A |

[0136] Furthermore, numerous polyketide products can be made from malonyl-coA precursors in combination with isobutyryl-coA precursors. It is described elsewhere how to construct a genetically modified organism to produce butyryl-coA or isobutyryl-coA from malonyl-coA. Products can be made by expressing enzyme functions to convert malonyl-coA in addition to isobutyryl-coA into products. Several examples of these non-limiting products are shown below in Table 1C. Any of the strains discussed in the specification that increase flux through malonyl-coA and also produce isobutyryl-coA can be used to produce these products. Phlorisobutyrophenone can be produced by expressing a phlorisobutyrophenone synthase from Humulus lupus.

TABLE 1C
Products requiring malonyl-coA and isobutyryl-coA precursors

| Chemical product | Biosynthesis |
|---|---|
| cohumulone | 3 malonyl-CoA + isobutyryl-CoA + 3 H+ = |
| | phlorisobutyrophenone + 3 CO2 + 4 coenzyme A |
| hyperforin | 3 malonyl-CoA + isobutyryl-CoA + 3 H+ = |
| | phlorisobutyrophenone + 3 CO2 + 4 coenzyme A |

[0137] In addition, numerous polyketide products can be made from malonyl-coA precursors in combination with coumaryl-coA or cinnamoyl-coA precursors. Coumaryl-coA or cinnamoyl-coA production in genetically modified organisms has been described, for example, in Yohei Katsuyama et al. (“Production of curcuminoids by Escherichia coli carrying an artificial biosynthesis pathway”, Microbiology (2008), 154, 2620-2628). These genetic modifications can be made in combination with modifications described herein to increase malonyl-coA production. Products can be made by expressing enzyme functions to convert malonyl-coA in addition to coumaryl-coA or cinnamoyl-coA into products. Several examples of these non-limiting products are shown below in Table 1D. p-coumaroyltriacetic acid lactone can be made by expressing a p-coumaroyltriacetic acid lactone synthase from humulus lupulus or rubeus idaeus. Naringenin chalcone can be made by expressing a naringenin chalcone synthase from either humulus lupulus or arabidopsis thaliana. Isoliquiritigenin or other flavonoids can be made by expressing a chalcone reductase from numerous sources. 4-hydroxybenzalacetone can be made by expressing a 4-hydroxybenzalacetone synthase from rubus idaeus. Pinocembrin chalcone can be made by expressing a pinocembrin chalcone synthase from pinus densiflora. Resvertrol can be made by expressing a resveratrol or stilbene synthase such as RS G-528 from arachis hypogaea or STS G-230 from rheum tatricum. Bis-noryangonin can be produced by expressing a styrylpyrone synthase such as from equisetum arvense. P-coumaroyltriacetate can be made by expressing a p-coumaroyltriacetic acid lactone synthase from hydrangea macrophylla. Pinosylvin can be made by expressing one of numeroues stilbene synthases such as stilbene synthase PDSTS2 from pinus denisflora.

TABLE 1D
Products requiring malonyl-coA and coumaryl-coA OR cinnamoyl-coA
precursors

| Chemical product | Biosynthesis |
|---|---|
| p-coumaroyltriacetic | 4-coumaroyl-CoA + 3 malonyl-CoA + 2 H+ = |
| acid lactone (aromatic | p-coumaroyltriacetic acid lactone + 3 CO2 + 4 |
| polyketide) | coenzyme A |
| naringenin chalcone | 4-coumaroyl-CoA + 3 malonyl-CoA + 3 H+ = |
| (flavonoid) | naringenin chalcone + 3 CO2 + 4 coenzyme A |
| isoliquiritigenin | 4-coumaroyl-CoA + 3 malonyl-CoA + NADPH + |
| (flavonoid) | 4 H+ = isoliquiritigenin + 3 CO2 + NADP+ + |
| | 4 coenzyme A + H20, |
| pinocembrin chalcone | 3 malonyl-CoA + (E)-cinnamoyl-CoA + 3 H+ = |
| (pinobanksin) | pinocembrin chalcone + 3 CO2 + 4 coenzyme A |
| 4 | 4-coumaroyl-CoA + malonyl-CoA + H 20 + |
| hydroxybenzalacetone | H+ = 4 hydroxybenzalacetone + 2 CO2 + 2 |
| (raspberry ketone) | coenzyme A |
| p-coumaroyltriacetate | 4-coumaroyl-CoA + 3 malonyl-CoA + H2O + 2 |
| (resveratrol) | H+ = 3 CO2 + p-coumaroyltriacetate + 4 |
| | coenzyme A |
| bis-noryangonin | 4-coumaroyl-CoA + 2 malonyl-CoA + H+ = |
| (resveratrol) | bis-noryangonin + 2 CO2 + 3 coenzyme A |
| resveratrol | 4-coumaroyl-CoA + 3 malonyl-CoA + 3 H+ = |
| | resveratrol + 4 CO2 + 4 coenzyme A |
| xanthohumol | 4-coumaroyl-CoA + 3 malonyl-CoA + 3 H+ = |
| | naringenin chalcone + 3 CO2 + 4 coenzyme A |
| pinosylvin | (E)-cinnamoyl-CoA + 3 malonyl-CoA + 3 H+ = |
| | 4 CO2 + pinosylvin + 4 coenzyme A |

[0138] Numerous polyketide products can also be made from malonyl-coA precursors in combination with isovaleryl-coA precursors. As isovaleryl-coA is a product of leucine degradation pathways, many metabolic pathways are known to produce this product. These genetic modifications can be made in combination with modifications described herein to increase malonyl-coA production. Products can be made by expressing enzyme functions to convert malonyl-coA in addition to isovaleryl-coA into products. Several examples of these non-limiting products are shown below in Table 1E. 6-isobutyl-4-hydroxy-2-pyrone can be made by expressing a 6-isobutyl-4-hydroxy-2-pyrone synthase from Humulus lupulus. 6-(4-methyl-2-oxopentyl)-4-hydroxy-2-pyrone can be made by expressing a 6-(4-methyl-2-oxopentyl)-4-hydroxy-2-pyrone synthase from Humulus lupulus.

TABLE 1E
Products requiring Malonyl-coA and isovaleryl-coA precursors

| Chemical product | Biosynthesis |
|---|---|
| 6-isobutyl-4-hydroxy-2- | isovaleryl-CoA + 2 malonyl-CoA + H+ = 6- |
| pyrone | isobutyl-4-hydroxy-2-pyrone + 2 CO2 + 3 |
| | coenzyme A |
| 6-(4-methyl-2- | isovaleryl-CoA + 3 malonyl-CoA + 2 H+ = 6- |
| oxopentyl)-4-hydroxy- | (4-methyl-2-oxopentyl)-4-hydroxy-2-pyrone + |
| 2-pyrone | 3 CO2 + 4 coenzyme A |

[0139] In addition, numerous polyketide products can be made from malonyl-coA precursors in combination with benzoyl-coA or 3-hydroxybenzoyl-coA precursors. Benzoyl-coA or 3-hydroxybenzoyl-coA production in genetically modified organisms has been described. In particular, one route to produce benzoyl-coA is from benzoate by expressing a benzoate-coA ligase such as from Hypericum androsaemum. In addition, 3-hydroxybenzoyl-coA can be made from 3-hydroxybenzoate by expressing a 3-hydroxybenzoate-coA ligase such as from Hypericum androsaemum. Products can be made by expressing enzyme functions to convert malonyl-coA in addition to benzoyl-coA or 3-hydroxybenzoyl-coA into products. Several examples of these non-limiting products are shown below in Table 1F. 2,3′,4,6-tetrahydroxybenzophenone can be made by expressing a benzophenone synthase from Centauraium erythraea. 2,4,6-trihydroxybenzophenone can be made by expressing a benzophenone synthase such as AF352395 from Hypericum androsaemum. 3,5-dihydroxybiphenyl can be made be expressing a 3,5-dihydroxybiphenyl synthase.

TABLE 1F
Products requiring Malonyl-coA and benzoyl-coA OR
3-hydroxy-benzoyl-coA precursors

| Chemical product | Biosynthesis |
|---|---|
| 2,3′,4,6- | 3-hydroxybenzoyl-CoA + 3 malonyl- |
| tetrahydroxybenzophenone | CoA + 3 H+ = 3 CO2 + 2,3′,4,6- |
| (tetrahydroxyxanthone) | tetrahydroxybenzophenone + 4 coenzyme A |
| 2,4,6- | 3 malonyl-CoA + benzoyl-CoA + 3 H+ = |
| trihydroxybenzophenone | 2,4,6-trihydroxybenzophenone + |
| (tetrahydroxyxanthone) | 3 CO2 + 4 coenzyme A |
| 3,5-dihydroxybiphenyl | 3 malonyl-CoA + benzoyl-CoA + 3 H+ = |
| | 3,5-dihydroxybiphenyl + 4 CO2 + 4 |
| | coenzyme A |

[0140] In addition to the above, numerous polyketide products can be made from malonyl-coA precursors in combination with other secondary metabolite precursors. For example, (2S,5S)-carboxymethylproline, the precursor to carbapenem can be made from malonyl-coA and (S)-1-pyrroline-5-carboxylate by expressing a carboxymethylproline synthase from Pectobacterium carotovorum. The (S)-1-pyrroline-5-carboxylate is a precursor to the amino acid proline, whose production is known. 1,3-dihydroxy-N-methylacridone can be made from malonyl-coA and the additional precursor N-methylanthraniloyl-CoA by expressing an acridone synthase such as ACSII from Ruta graveolens. N-methylanthraniloyl-CoA can be made metabolically from the aromatic amino acid precursor chorismate by expressing an anthranilate synthase such as Ruta graveolens to convert chorismate to anthranilate, additionally expressing an anthranilate N-methyltransferase from Ruta graveolens to produce N-methylanthranilate from anthranilate and finally expressing a N-methylanthranilate-coA ligase to produce N-methylanthraniloyl-coA from N-methylanthranilate. Several examples of non-limiting products are shown below in Table 1G.

TABLE 1G
Products requiring Malonyl-coA and other secondary metabolites.

| Chemical product | Biosynthesis |
|---|---|
| (2S,5S)- | (S)-1-pyrroline-5-carboxylate + malonyl- |
| carboxymethylproline | CoA + H2O + H+ = (2S,5S)- |
| ((5R)-carbapenem) | carboxymethylproline + CO2 + coenzyme |
| 1,3-dihydroxy-N- | N-methylanthraniloyl-CoA + 3 malonyl-CoA = |
| methylacridone | 3 CO2 + 1,3-dihydroxy-N-methylacridone + 4 |
| (acridone alkaloid) | coenzyme A |

[0141] In addition to the above, several malonyl-coA conjugate products can be made by supplying a cell with an enzyme expressing a malonyl-transferase to add a malonyl group to a larger molecule. For example, an isoflavone-7-O-glucoside-6-O-malonyl-transferase can add malonyl group to biochanin glucosides to produce biochanin glucoside malonates, an isoflavone-7-O-glucoside-6-O-malonyl-transferase can add malonyl group to biochanin glucosides to produce biochanin glucoside malonates, or alternatively add a malonyl group to glucosyl-apegenins to produce apegenin malonyl-glucosides. Table 1H gives the reaction of several malonyltransferases and substrates and products. Enzymes that can be expressed to perform these conversions can be identified in numerous databases in the art such as <<www.metacyc.org>>.

TABLE 1H
Products requiring Malonyl-coA and malonyltransferases

| Chemical product | Biosynthesis |
|---|---|
| apigenin 7-0(6-malonyl-B- | 7 0 B D glucosyl-apigenin + malonyl- |
| D-glucoside) | CoA = apigenin 7-0(6-malonyl-B-D- |
| (apigenin glycosides) | glucoside) + coenzyme A |
| biochanin A 7 0 glucoside- | biochanin A 7 0 glucoside + malonyl CoA + |
| 6″-malonate | ATP + H2O = biochanin A 7 0 glucoside-6″- |
| (biochanin A conjugates | malonate + AMP + diphosphate + coenzyme A + |
| interconversion) | 2 H+ |
| maackiain 3 0 glucoside-6″- | (−)-maackiain 3 0 glucoside + malonyl CoA + |
| malonate | ATP + H2O = ( ) maackiain 3 0 glucoside-6″- |
| (maackiain conjugates | malonate + AMP + diphosphate + coenzyme A + |
| interconversion) | 2 H+ |
| medicarpin 3 0 glucoside-6″- | (−)-medicarpin 3 0 glucoside + malonyl CoA + |
| malonate | ATP + H2O = ( ) medicarpin 3 0 glucoside-6″- |
| (medicarpin conjugates | malonate + AMP + diphosphate + coenzyme A + |
| interconversion) | 2 H+ |
| Malonyldaidzin | daidzin + malonyl-CoA + ATP + H2O = |
| (daidzein conjugates | malonyldaidzin + AMP + diphosphate + |
| interconversion) | coenzyme A + 2 H+ |
| formononetin 7 0 glucoside- | ononin + malonyl-CoA + ATP + H2O = |
| 6″-malonate | formononetin 7 0 glucoside-6″-malonate + |
| (formononetin conjugates | AMP + diphosphate + coenzyme A + 2 H+ |
| interconversion) | |
| Malonylgenistin | genistin + malonyl-CoA + ATP + H2O = |
| (genistein conjugates | malonylgenistin + AMP + diphosphate + |
| interconversion) | coenzyme A + 2 H+ |
| pelargonidin 3 0 (6 0 | pelargonidin 3 0 B D-glucoside + malonyl- |
| malonyl B D glucoside) | CoA + H+ = pelargonidin 3 0 (6 0 malonyl B D |
| (pelargonidin conjugates) | glucoside) + coenzyme A |
| salvianin | monodemalonylsalvianin + malonyl-CoA + H+ = |
| | salvianin + coenzyme A, |
| | bisdemalonylsalvianin + malonyl-CoA + H+ = |
| | monodemalonylsalvianin + coenzyme A |
| malonylshisonin | shisonin + malonyl-CoA + H+ = |
| | malonylshisonin + coenzyme A |
| malonylshisonin | superpathway of anthocyanin biosynthesis |
| | (from cyanidin and cyanidin 3-0-glucoside): |
| | shisonin + malonyl-CoA + H+ = |
| | malonylshisonin + coenzyme A |
| delphinidin 3-0-(6″-0- | delphinidin 3 0 B D-glucoside + malonyl- |
| malonyl)-B-glucoside | CoA = delphinidin 3-0-(6′-0-malonyl)-B- |
| (ternatin C5) | glucoside + coenzyme A |
| N-Malonylanthranilate | anthranilate + malonyl-CoA = N- |
| | Malonylanthranilate + coenzyme A |
| N-(3,4-dichlorophenyl)- | 3,4-dichloroaniline + malonyl-CoA = N-(3,4- |
| malonamate | dichlorophenyl)-malonamate + coenzyme A |
| anthocyanidin 3 0 (6 0 | malonyl-CoA + an anthocyanidin 3 0 B D |
| malonyl B D glucoside) | glucoside = an anthocyanidin 3 0 (6 0 malonyl B D |
| | glucoside) + coenzyme A |
| 7 hydroxyflavone 7 0 (6 | 7 0 B D glucosyl 7 hydroxyflavone + malonyl |
| malonyl-B-D-glucoside) | CoA = 7 hydroxyflavone 7 0 (6 malonyl-B-D- |
| | glucoside) + coenzyme A |

[0142] Also provided herein, in addition to 3-HP and chemcials and products made from it (including methylacrylate), and various polyketides provided in the tables, are teachings and other disclosures variously directed to production of phloroglucinol, resorcinol, malonic acid, diacids, dienes, flaviolin, malonate, chalcones, pyrones, type I, II and III polyketides more generally and other chemicals and other products made from these. FIG. 5 schematically depicts bioconversions from exemplary carbon sources to these various chemical products. It is noted that in various embodiments the invention may be applied to produce fatty acids and subsequently to obtain products made from these, such as jet fuel and diesel. In various embodiments, this is achieved by use of a pathway comprising an elongase as disclosed herein.

[0143] Any of the chemicals described or otherwise disclosed herein, including in the figures, may be a selected chemical product, or a chemical product of interest. Also, any grouping, including any sub-group, of the above listing may be considered what is referred to by “selected chemical product,” “chemical product of interest,” and the like. For any of these chemical products a microorganism may inherently comprise a biosynthesis pathway to such chemical product and/or may require addition of one or more heterologous nucleic acid sequences to provide or complete such a biosynthesis pathway, in order to achieve a desired production of such chemical product.

[0144] U.S. Patent Publication US2009/0111151 A1, incorporated by reference for its teachings of synthesis of various polyketides, describes illustrative polyketide synthase (PKS) genes and corresponding enzymes that can be utilized in the construction of genetically modified microorganisms and related methods and systems. Any of these may be employed in the embodiments of the present invention, such as in microorganisms that produce polyketides and also comprise modifications to reduce activity of fatty acid synthase enzymatic conversions.

[0145] U.S. Patent Publication US2011/0171702 A1, incorporated by reference for its teachings of synthesis of 2-hydroxybutyric acid (2-HIBA), describes production of 2-HIBA and corresponding enzymes that can be utilized in the construction of genetically modified microorganisms and related methods and systems. Any of these may be employed in the embodiments of the present invention, such as in microorganisms that produce 2-HIBA and also comprise modifications to reduce activity of fatty acid synthase enzymatic conversions.

[0146] U.S. Patent Publication US2010/0291644 A1, incorporated by reference for its teachings of preparing methacrylic acid or methacrylic esters from 3-hydroxyisobutyric acid (3-HIBA) or polyhydroxyalkanoates based on 3-HIBA, describes the production of 3-HIBA and corresponding enzymes that can be utilized in the construction of genetically modified microorganisms and related methods and systems and the dehydration to methacrylic. Any of these may be employed in the embodiments of the present invention, such as in microorganisms that produce 3-HIBA and/or polyhydroxyalkanoates and also comprise modifications to reduce activity of fatty acid synthase enzymatic conversions.

[0147] U.S. Patent Publication US2008/0274523 A1, incorporated by reference for its teachings of synthesis of various isoprenoids, describes illustrative isoprenoid synthesis genes and corresponding enzymes that can be utilized in the construction of genetically modified microorganisms and related methods and systems. Any of these may be employed in the embodiments of the present invention, such as in microorganisms that produce mevalonate or other isoprenoids and also comprise modifications to reduce activity of fatty acid synthase enzymatic conversions.

[0148] U.S. Pat. No. 6,593,116 incorporated by reference for its teachings of transgenic microbial production of polyhydroxyalkanoates, describes polyhydroxyalkanoate synthesis and corresponding enzymes that can be utilized in the construction of genetically modified microorganisms and related methods and systems. Any of these may be employed in the embodiments of the present invention, such as in microorganisms that produce polyhydroxybutyrate or other polyhydroxyalkanoates and also comprise modifications to reduce activity of fatty acid synthase enzymatic conversions.

[0149] Particular polyketide chemical products which are considered to be chemical product biosynthesis candidates under the present invention include the following: Amphotericin B; antimycin A; brefeldin A; candicidin; epothilones; erythromycin; azithromycin; clarithromycin; erythromycin estolate; erythromycin ethylsuccinate; roxithromycin; ivermectin; josamycin; ketolides; leucomycins; kitasamycin; spiramycin; lovastatin; lucensomycin; macrolides; maytansine; mepartricin; miocamycin; natamycin; nystatin; oleandomycin; troleandomycin; oligomycins; rutamycin; sirolimus; tacrolimus; tylosin; oleandomycin; deoxyoleandolide; narbonolide; narbomycin; and pikromycin.

### V. GENETIC MODIFICATIONS

[0150] Embodiments of the present invention may result from introduction of an expression vector into a host microorganism, wherein the expression vector contains a nucleic acid sequence coding for an enzyme that is, or is not, normally found in a host microorganism.

[0151] The ability to genetically modify a host cell is essential for the production of any genetically modified (recombinant) microorganism. The mode of gene transfer technology may be by electroporation, conjugation, transduction, or natural transformation. A broad range of host conjugative plasmids and drug resistance markers are available. The cloning vectors are tailored to the host organisms based on the nature of antibiotic resistance markers that can function in that host. Also, as disclosed herein, a genetically modified (recombinant) microorganism may comprise modifications other than via plasmid introduction, including modifications to its genomic DNA.

[0152] Those skilled in the art will understand that the genetic alterations, including metabolic modifications exemplified herein are described with reference to a suitable source organism such as E. coli, yeast, or other organisms disclosed herein and their corresponding metabolic enzymatic reactions or a suitable source organism for desired genetic material such as genes encoding enzymes for their corresponding metabolic enzymatic reactions. However, given the complete genome sequencing of a wide variety of organisms and the high level of skill in the area of genomics, those skilled in the art will readily be able to apply the teachings and guidance provided herein to essentially all other microorganisms. For example, the E. coli metabolic alterations exemplified herein can readily be applied to other species by incorporating the same or analogous encoding nucleic acid from species other than the referenced species. Such genetic alterations include, for example, genetic alterations of species homologs, in general, and in particular, orthologs, paralogs or nonorthologous gene displacements.

[0153] An ortholog is a gene or genes that are related by vertical descent and are responsible for substantially the same or identical functions in different organisms. Genes are related by vertical descent when, for example, they share sequence similarity of sufficient amount to indicate they are homologous, or related by evolution from a common ancestor. Genes can also be considered orthologs if they share three-dimensional structure but not necessarily sequence similarity, of a sufficient amount to indicate that they have evolved from a common ancestor to the extent that the primary sequence similarity is not identifiable. Genes that are orthologous can encode proteins with sequence similarity of about 25% to 100% amino acid sequence identity. Genes encoding proteins sharing an amino acid similarity less that 25% can also be considered to have arisen by vertical descent if their three-dimensional structure also shows similarities. Members of the serine protease family of enzymes, including tissue plasminogen activator and elastase, are considered to have arisen by vertical descent from a common ancestor.

[0154] Orthologs include genes or their encoded gene products that through, for example, evolution, have diverged in structure or overall activity. For example, where one species encodes a gene product exhibiting two functions and where such functions have been separated into distinct genes in a second species, the three genes and their corresponding products are considered to be orthologs. An example of orthologs exhibiting separable activities is where distinct activities have been separated into distinct gene products between two or more species or within a single species. A specific example is the separation of elastase proteolysis and plasminogen proteolysis, two types of serine protease activity, into distinct molecules as plasminogen activator and elastase.

[0155] In contrast, paralogs are homologues related by, for example, duplication followed by evolutionary divergence and have similar or common, but not identical functions. Paralogs can originate or derive from, for example, the same species or from a different species. For example, microsomal epoxide hydrolase (epoxide hydrolase I) and soluble epoxide hydrolase (epoxide hydrolase II) can be considered paralogs because they represent two distinct enzymes, co-evolved from a common ancestor, that catalyze distinct reactions and have distinct functions in the same species. Paralogs are proteins from the same species with significant sequence similarity to each other suggesting that they are homologous, or related through co-evolution from a common ancestor. Groups of paralogous protein families include HipA homologs, luciferase genes, peptidases, and others. A nonorthologous gene displacement is a nonorthologous gene from one species that can substitute for a referenced gene function in a different species. Substitution includes, for example, being able to perform substantially the same or a similar function in the species of origin compared to the referenced function in the different species. Although generally, a nonorthologous gene displacement will be identifiable as structurally related to a known gene encoding the referenced function, less structurally related but functionally similar genes and their corresponding gene products nevertheless will still fall within the meaning of the term as it is used herein. In some cases, functional similarity requires at least some structural similarity in the active site or binding region of a nonorthologous gene compared to a gene encoding the function sought to be substituted. Therefore, a nonorthologous gene includes, for example, a paralog or an unrelated gene.

[0156] Therefore, in identifying and designing a genetically modified microorganism of the present invention, those skilled in the art will understand with applying the teaching and guidance provided herein to a particular species that the identification of genetic modifications can include identification and inclusion or inactivation or other modification of orthologs. To the extent that paralogs and/or nonorthologous gene displacements are present in the referenced microorganism that encode an enzyme catalyzing a similar or substantially similar metabolic reaction, those skilled in the art also can utilize these evolutionarily related genes. Orthologs, paralogs and nonorthologous gene displacements can be determined by methods well known to those skilled in the art. For example, inspection of nucleic acid or amino acid sequences for two polypeptides will reveal sequence identity and similarities between the compared sequences. Based on such similarities, one skilled in the art can determine if the similarity is sufficiently high to indicate the proteins are related through evolution from a common ancestor. Algorithms well known to those skilled in the art, such as Align, BLAST, Clustal Wand others compare and determine a raw sequence similarity or identity, and also determine the presence or significance of gaps in the sequence which can be assigned a weight or score. Such algorithms also are known in the art and are similarly applicable for determining nucleotide sequence similarity or identity. Parameters for sufficient similarity to determine relatedness are computed based on well known methods for calculating statistical similarity, or the chance of finding a similar match in a random polypeptide, and the significance of the match determined. A computer comparison of two or more sequences can, if desired, also be optimized visually by those skilled in the art. Related gene products or proteins can be expected to have a high similarity, for example, 25% to 100% sequence identity. Proteins that are unrelated can have an identity which is essentially the same as would be expected to occur by chance, if a database of sufficient size is scanned (about 5%). Sequences between 5% and 24% sequence identity may or may not represent sufficient homology to conclude that the compared sequences are related. Additional statistical analysis to determine the significance of such matches given the size of the data set can be carried out to determine the relevance of these sequences.

[0157] Exemplary parameters for determining relatedness of two or more sequences using the BLAST algorithm, for example, can be as set forth below. Briefly, amino acid sequence alignments can be performed using BLASTP version 2.0.8 (Jan. 5, 1999) and the following parameters: Matrix: 0 BLOSUM62; gap open: 11; gap extension: 1; x_dropoff: 50; expect: 10.0; wordsize: 3; filter: on. Nucleic acid sequence alignments can be performed using BLASTN version 2.0.6 (Sep. 16, 1998) and the following parameters: Match: 1; mismatch: −2; gap open: 5; gap extension: 2; x_dropoff: 50; expect: 10.0; wordsize: 11; filter: off. Those skilled in the art will know what modifications can be made to the above parameters to either increase or decrease the stringency of the comparison, for example, and determine the relatedness of two or more sequences. Through such comparisons and analyses, one skilled in the art may be able to obtain a desired polypeptide in a particular species that functions similarly to a polypeptide (enzyme) disclosed herein, and/or a functional variant that possesses a desired enzymatic activity.

[0158] Also, in various embodiments polypeptides, such as enzymes, obtained by the expression of the any of the various polynucleotide molecules (i.e., nucleic acid sequences) of the present invention may have at least approximately 50%, 60%, 70%, 80%, 90%, 95%, 96%, 97%, 98%, 99% or 100% identity to one or more amino acid sequences encoded by the genes and/or nucleic acid sequences described herein.

[0159] Embodiments of the present invention may involve various nucleic acid sequences, such as heterologous nucleic acid sequences introduced into a cell's genome or may be episomal, and also encompasses antisense nucleic acid molecules, i.e., molecules which are complementary to a sense nucleic acid encoding a protein, e.g., complementary to the coding strand of a double-stranded eDNA molecule or complementary to an mRNA sequence.

[0160] For various embodiments of the invention the genetic manipulations may be described to include various genetic manipulations, including those directed to change regulation of, and therefore ultimate activity of, an enzyme or enzymatic activity of an enzyme identified in any of the respective pathways. Such genetic modifications may be directed to transcriptional, translational, and post-translational modifications that result in a change of enzyme activity and/or selectivity under selected and/or identified culture conditions and/or to provision of additional nucleic acid sequences such as to increase copy number and/or mutants of an enzyme related to 3-HP production. Specific methodologies and approaches to achieve such genetic modification are well known to one skilled in the art, and include, but are not limited to: increasing expression of an endogenous genetic element; decreasing functionality of a repressor gene; introducing a heterologous genetic element; increasing copy number of a nucleic acid sequence encoding a polypeptide catalyzing an enzymatic conversion step to produce 3-HP; mutating a genetic element to provide a mutated protein to increase specific enzymatic activity; over-expressing; under-expressing; over-expressing a chaperone; knocking out a protease; altering or modifying feedback inhibition; providing an enzyme variant comprising one or more of an impaired binding site for a repressor and/or competitive inhibitor; knocking out a repressor gene; evolution, selection and/or other approaches to improve mRNA stability as well as use of plasmids having an effective copy number and promoters to achieve an effective level of improvement. Random mutagenesis may be practiced to provide genetic modifications that may fall into any of these or other stated approaches. The genetic modifications further broadly fall into additions (including insertions), deletions (such as by a mutation) and substitutions of one or more nucleic acids in a nucleic acid of interest. In various embodiments a genetic modification results in improved enzymatic specific activity and/or turnover number of an enzyme. Without being limited, changes may be measured by one or more of the following: KM; Kam; and In various embodiments, to function more efficiently, a microorganism may comprise one or more gene deletions. For example, in E. coli, the genes encoding the lactate dehydrogenase (ldhA), phosphate acetyltransferase (pta), pyruvate oxidase (poxB), and pyruvate-formate lyase (pflB) may be disrupted, including deleted. Such gene disruptions, including deletions, are not meant to be limiting, and may be implemented in various combinations in various embodiments. Gene deletions may be accomplished by mutational gene deletion approaches, and/or starting with a mutant strain having reduced or no expression of one or more of these enzymes, and/or other methods known to those skilled in the art. Gene deletions may be effectuated by any of a number of known specific methodologies, including but not limited to the RED/ET methods using kits and other reagents sold by Gene Bridges (Gene Bridges GmbH, Dresden, Germany, <<www.genebridges.com>>). More particularly as to the latter method, use of Red/ET recombination, is known to those of ordinary skill in the art and described in U.S. Pat. Nos. 6,355,412 and 6,509,156, issued to Stewart et al. and incorporated by reference herein for its teachings of this method. Material and kits for such method are available from Gene Bridges (Gene Bridges GmbH, Dresden, Germany, <<www.genebridges.com>>), and the method may proceed by following the manufacturer's instructions. The method involves replacement of the target gene by a selectable marker via homologous recombination performed by the recombinase from X-phage. The host organism expressing k-red recombinase is transformed with a linear DNA product coding for a selectable marker flanked by the terminal regions (generally −50 bp, and alternatively up to about −300 bp) homologous with the target gene. The marker could then be removed by another recombination step performed by a plasmid vector carrying the FLP-recombinase, or another recombinase, such as Cre. Targeted deletion of parts of microbial chromosomal DNA or the addition of foreign genetic material to microbial chromosomes may be practiced to alter a host cell's metabolism so as to reduce or eliminate production of undesired metabolic products. This may be used in combination with other genetic modifications such as described herein in this general example. In this detailed description, reference has been made to multiple embodiments and to the accompanying drawings in which is shown by way of illustration specific exemplary embodiments in which the invention may be practiced. These embodiments are described in sufficient detail to enable those skilled in the art to practice the invention, and it is to be understood that modifications to the various disclosed embodiments may be made by a skilled artisan. Further, for 3-HP production, such genetic modifications may be chosen and/or selected for to achieve a higher flux rate through certain enzymatic conversion steps within the respective 3-HP production pathway and so may affect general cellular metabolism in fundamental and/or major ways. It has long been recognized in the art that some amino acids in amino acid sequences can be varied without significant effect on the structure or function of proteins. Variants included can constitute deletions, insertions, inversions, repeats, and type substitutions so long as the indicated enzyme activity is not significantly adversely affected. Guidance concerning which amino acid changes are likely to be phenotypically silent can be found, inter alia, in Bowie, J. U., et al., “Deciphering the Message in Protein Sequences: Tolerance to Amino Acid Substitutions,” Science 247:1306-1310 (1990). This reference is incorporated by reference for such teachings, which are, however, also generally known to those skilled in the art.

[0161] Further, it will be appreciated that amino acid “homology” includes conservative substitutions, i.e. those that substitute a given amino acid in a polypeptide by another amino acid of similar characteristics. Recognized conservative amino acid substitutions comprise (substitutable amino acids following each colon of a set): ala:ser; arg:lys; asn:gln or his; asp:glu; cys:ser; gln:asn; glu:asp; gly:pro; his:asn or gln; ile:leu or val; leu:ile or val; lys: arg or gln or glu; met:leu or ile; phe:met or leu or tyr; ser:thr; thr:ser; trp:tyr; tyr:trp or phe; val:ile or leu. Also generally recognized as conservative substitutions are the following replacements: replacements of an aliphatic amino acid such as Ala, Val, Leu and Ile with another aliphatic amino acid; replacement of a Ser with a Thr or vice versa; replacement of an acidic residue such as Asp or Glu with another acidic residue; replacement of a residue bearing an amide group, such as Asn or Gln, with another residue bearing an amide group; exchange of a basic residue such as Lys or Arg with another basic residue; and replacement of an aromatic residue such as Phe or Tyr with another aromatic residue.

[0162] For all polynucleotide (nucleic acid) and polypeptide (amino acid) sequences provided herein, it is appreciated that conservatively modified variants of these sequences are included, and are within the scope of the invention in its various embodiments. Conservatively modified variant include amino acid conservative substitutions such as those described in the previous paragraph as well as modified polynucleotide sequences such as based on codon degeneracy described in the following paragraph and table. Further, the following table also provides characteristics of amino acids that provide for additional conservative substitutions that may fall within the scope of conservatively modified variants, based on commonly shared properties of particular amino acids. Also, in various embodiments deletions and/or substitutions at either end, or in other regions, of a polynucleotide or polypeptide may be practiced for sequences, based on the present teachings and knowledge of those skilled in the art, and remain within the scope of conservatively modified variants.

[0163] Accordingly, functionally equivalent polynucleotides and polypeptides (functional variants), which may include conservatively modified variants as well as more extensively varied sequences, which are well within the skill of the person of ordinary skill in the art, and microorganisms comprising these, also are within the scope of various embodiments of the invention, as are methods and systems comprising such sequences and/or microorganisms. In various embodiments, nucleic acid sequences encoding sufficiently homologous proteins or portions thereof are within the scope of the invention. More generally, nucleic acids sequences that encode a particular amino acid sequence employed in the invention may vary due to the degeneracy of the genetic code, and nonetheless fall within the scope of the invention. The following table provides a summary of similarities among amino acids, upon which conservative substitutions may be based, and also various codon redundancies that reflect this degeneracy.

TABLE 2

| Amino Acid | Relationships | DNA codons |
|---|---|---|
| Alanine | — | GCT, GCC, GCA, GCG |
| Proline | N | CCT, CCC, CCA, CCG |
| Valine | N, Ali | GTT, GTC, GTA, GTG |
| Leucine | N, Ali | CTT, CTC, CTA, CTG, |
| | | TTA, TTG |
| Isoleucine | N, Ali | ATT, ATC, ATA |
| Methionine | N | ATG |
| Phenylalanine | N, Aro | |
| Tryptophan | | TTT, TTC |
| Glycine | N | TGG |
| Serine | PU | GGT, GGC, GGA, |
| | | GGG |
| Threonine | PU | TCT, TCC, TCA, TCG, |
| | | AGT, AGC |
| Asparagine | PU | ACT, ACC, ACA, ACG |
| Glutamine | PU, Ami | AAT, AAC |
| Cysteine | PU, Ami | CAA, CAG |
| Aspartic acid | | TGT, TGC |
| Glutamic acid | | GAT, GAC |
| Arginine | NEG, A | GAA, GAG |
| Lysine | POS, B | CGT, CGC, CGA, |
| | | CGG, AGA, AGG |
| Histidine | POS, B | AAA, AAG |
| Tyrosine | POS | CAT, CAC |
| Stop Codons | Aro | TAT, TAC |
| | | TAA, TAG, TGA |

Legend:
side groups and other related properties:
A = acidic;
B = basic;
Ali = aliphatic;
Ami = amine;
Aro = aromatic;
N = nonpolar;
PU = polar uncharged;
NEG = negatively charged;
POS = positively charged.

[0164] It is noted that codon preferences and codon usage tables for a particular species can be used to engineer isolated nucleic acid molecules that take advantage of the codon usage preferences of that particular species. For example, the isolated nucleic acid provided herein can be designed to have codons that are preferentially used by a particular organism of interest. Numerous software and sequencing services are available for such codon-optimizing of sequences. It also is noted that less conservative substitutions may be made and still provide a functional variant.

[0165] In various embodiments polypeptides obtained by the expression of the polynucleotide molecules of the present invention may have at least approximately 50%, 60%, 70%, 80%, 90%, 95%, 96%, 97%, 98%, 99% or 100% identity to one or more amino acid sequences encoded by the genes and/or nucleic acid sequences described herein for chemical product biosynthesis pathways.

[0166] As a practical matter, whether any particular polypeptide is at least 50%, 60%, 70%, 80%, 85%, 90%, 92%, 95%, 96%, 97%, 98% or 99% identical to any reference amino acid sequence of any polypeptide described herein (which may correspond with a particular nucleic acid sequence described herein), such particular polypeptide sequence can be determined conventionally using known computer programs such the Bestfit program (Wisconsin Sequence Analysis Package, Version 8 for Unix, Genetics Computer Group, University Research Park, 575 Science Drive, Madison, Wis. 53711). When using Bestfit or any other sequence alignment program to determine whether a particular sequence is, for instance, 95% identical to a reference sequence according to the present invention, the parameters are set such that the percentage of identity is calculated over the full length of the reference amino acid sequence and that gaps in homology of up to 5% of the total number of amino acid residues in the reference sequence are allowed.

[0167] For example, in a specific embodiment the identity between a reference sequence (query sequence, i.e., a sequence of the present invention) and a subject sequence, also referred to as a global sequence alignment, may be determined using the FASTDB computer program based on the algorithm of Brutlag et al. (Comp. App. Biosci. 6:237-245 (1990)). Preferred parameters for a particular embodiment in which identity is narrowly construed, used in a FASTDB amino acid alignment, are: Scoring Scheme=PAM (Percent Accepted Mutations) 0, k-tuple=2, Mismatch Penalty=1, Joining Penalty=20, Randomization Group Length=0, Cutoff Score=1, Window Size=sequence length, Gap Penalty=5, Gap Size Penalty=0.05, Window Size=500 or the length of the subject amino acid sequence, whichever is shorter. According to this embodiment, if the subject sequence is shorter than the query sequence due to N- or C-terminal deletions, not because of internal deletions, a manual correction is made to the results to take into consideration the fact that the FASTDB program does not account for N- and C-terminal truncations of the subject sequence when calculating global percent identity. For subject sequences truncated at the N- and C-termini, relative to the query sequence, the percent identity is corrected by calculating the number of residues of the query sequence that are lateral to the N- and C-terminal of the subject sequence, which are not matched/aligned with a corresponding subject residue, as a percent of the total bases of the query sequence. A determination of whether a residue is matched/aligned is determined by results of the FASTDB sequence alignment. This percentage is then subtracted from the percent identity, calculated by the FASTDB program using the specified parameters, to arrive at a final percent identity score. This final percent identity score is what is used for the purposes of this embodiment. Only residues to the N- and C-termini of the subject sequence, which are not aligned with the query sequence, are considered for the purposes of manually adjusting the percent identity score. That is, only query residue positions outside the farthest N- and C-terminal residues of the subject sequence are considered for this manual correction. For example, a 90 amino acid residue subject sequence is aligned with a 100 residue query sequence to determine percent identity. The deletion occurs at the N-terminus of the subject sequence and therefore, the FASTDB alignment does not show a matching/alignment of the first 10 residues at the N-terminus. The 10 unpaired residues represent 10% of the sequence (number of residues at the N- and C-termini not matched/total number of residues in the query sequence) so 10% is subtracted from the percent identity score calculated by the FASTDB program. If the remaining 90 residues were perfectly matched the final percent identity would be 90%. In another example, a 90 residue subject sequence is compared with a 100 residue query sequence. This time the deletions are internal deletions so there are no residues at the N- or C-termini of the subject sequence which are not matched/aligned with the query. In this case the percent identity calculated by FASTDB is not manually corrected. Once again, only residue positions outside the N- and C-terminal ends of the subject sequence, as displayed in the FASTDB alignment, which are not aligned with the query sequence are manually corrected for.

[0168] More generally, nucleic acid constructs can be prepared comprising an isolated polynucleotide encoding a polypeptide having enzyme activity operably linked to one or more (several) control sequences that direct the expression of the coding sequence in a microorganism, such as E. coli, under conditions compatible with the control sequences. The isolated polynucleotide may be manipulated to provide for expression of the polypeptide. Manipulation of the polynucleotide's sequence prior to its insertion into a vector may be desirable or necessary depending on the expression vector. The techniques for modifying polynucleotide sequences utilizing recombinant DNA methods are well established in the art.

[0169] The control sequence may be an appropriate promoter sequence, a nucleotide sequence that is recognized by a host cell for expression of a polynucleotide encoding a polypeptide of the present invention. The promoter sequence contains transcriptional control sequences that mediate the expression of the polypeptide. The promoter may be any nucleotide sequence that shows transcriptional activity in the host cell of choice including mutant, truncated, and hybrid promoters, and may be obtained from genes encoding extracellular or intracellular polypeptides either homologous or heterologous to the host cell. Examples of suitable promoters for directing transcription of the nucleic acid constructs, especially in an E. coli host cell, are the lac promoter (Gronenborn, 1976, Mol. Gen. Genet. 148: 243-250), tac promoter (DeBoer et al., 1983, Proceedings of the National Academy of Sciences USA 80: 21-25), trc promoter (Brosius et al, 1985, J. Biol. Chem. 260: 3539-3541), T7 RNA polymerase promoter (Studier and Moffatt, 1986, J. MoI. Biol. 189: 113 [symbol] 130), phage promoter pL (Elvin et al., 1990, Gene 87: 123-126), tetA prmoter (Skerra, 1994, Gene 151:131 [symbol] 135), araBAD promoter (Guzman et al., 1995, J. Bacteriol. 177: 4121-4130), and rhaPBAD promoter (Haldimann et al., 1998, J. Bacteriol. 180: 1277-1286). Other promoters are described in “Useful proteins from recombinant bacteria” in Scientific American, 1980, 242: 74-94; and in Sambrook and Russell, “Molecular Cloning: A Laboratory Manual,” Third Edition 2001 (volumes 1-3), Cold Spring Harbor Laboratory Press, Cold Spring Harbor, N.Y.

[0170] The control sequence may also be a suitable transcription terminator sequence, a sequence recognized by a host cell to terminate transcription. The terminator sequence is operably linked to the 3′ terminus of the nucleotide sequence encoding the polypeptide. Any terminator that is functional in an E. coli cell may be used in the present invention. It may also be desirable to add regulatory sequences that allow regulation of the expression of the polypeptide relative to the growth of the host cell. Examples of regulatory systems are those that cause the expression of the gene to be turned on or off in response to a chemical or physical stimulus, including the presence of a regulatory compound. Regulatory systems in prokaryotic systems include the lac, tac, and trp operator systems.

[0171] Also, variants and portions of particular nucleic acid sequences, and respective encoded amino acid sequences recited herein may be exhibit a desired functionality, e.g., enzymatic activity at a selected level, when such nucleic acid sequence variant and/or portion contains a 15 nucleotide sequence identical to any 15 nucleotide sequence set forth in the nucleic acid sequences recited herein including, without limitation, the sequence starting at nucleotide number 1 and ending at nucleotide number 15, the sequence starting at nucleotide number 2 and ending at nucleotide number 16, the sequence starting at nucleotide number 3 and ending at nucleotide number 17, and so forth. It will be appreciated that the invention also provides isolated nucleic acid that contains a nucleotide sequence that is greater than 15 nucleotides (e.g., 16, 17, 18, 19, 20, 21, 22, 23, 24, 25, 26, 27, 28, 29, 30 or more nucleotides) in length and identical to any portion of the sequence set forth in nucleic acid sequences recited herein. For example, the invention provides isolated nucleic acid that contains a 25 nucleotide sequence identical to any 25 nucleotide sequence set forth in any one or more (including any grouping of) nucleic acid sequences recited herein including, without limitation, the sequence starting at nucleotide number 1 and ending at nucleotide number 25, the sequence starting at nucleotide number 2 and ending at nucleotide number 26, the sequence starting at nucleotide number 3 and ending at nucleotide number 27, and so forth. Additional examples include, without limitation, isolated nucleic acids that contain a nucleotide sequence that is 50 or more nucleotides (e.g., 100, 150, 200, 250, 300, or more nucleotides) in length and identical to any portion of any of the sequences disclosed herein. Such isolated nucleic acids can include, without limitation, those isolated nucleic acids containing a nucleic acid sequence represented in any one section of discussion and/or examples, including nucleic acid sequences encoding enzymes of the fatty acid synthase system. For example, the invention provides an isolated nucleic acid containing a nucleic acid sequence listed herein that contains a single insertion, a single deletion, a single substitution, multiple insertions, multiple deletions, multiple substitutions, or any combination thereof (e.g., single deletion together with multiple insertions). Such isolated nucleic acid molecules can share at least 60, 65, 70, 75, 80, 85, 90, 95, 97, 98, or 99 percent sequence identity with a nucleic acid sequence listed herein (i.e., in the sequence listing).

[0172] Additional examples include, without limitation, isolated nucleic acids that contain a nucleic acid sequence that encodes an amino acid sequence that is 50 or more amino acid residues (e.g., 100, 150, 200, 250, 300, or more amino acid residues) in length and identical to any portion of an amino acid sequence listed or otherwise disclosed herein.

[0173] In addition, the invention provides isolated nucleic acid that contains a nucleic acid sequence that encodes an amino acid sequence having a variation of an amino acid sequence listed or otherwise disclosed herein. For example, the invention provides isolated nucleic acid containing a nucleic acid sequence encoding an amino acid sequence listed or otherwise disclosed herein that contains a single insertion, a single deletion, a single substitution, multiple insertions, multiple deletions, multiple substitutions, or any combination thereof (e.g., single deletion together with multiple insertions). Such isolated nucleic acid molecules can contain a nucleic acid sequence encoding an amino acid sequence that shares at least 60, 65, 70, 75, 80, 85, 90, 95, 97, 98, or 99 percent sequence identity with an amino acid sequence listed or otherwise disclosed herein.

[0174] The invention provides polypeptides that contain the entire amino acid sequence of an amino acid sequence listed or otherwise disclosed herein. In addition, the invention provides polypeptides that contain a portion of an amino acid sequence listed or otherwise disclosed herein. For example, the invention provides polypeptides that contain a 15 amino acid sequence identical to any 15 amino acid sequence of an amino acid sequence listed or otherwise disclosed herein including, without limitation, the sequence starting at amino acid residue number 1 and ending at amino acid residue number 15, the sequence starting at amino acid residue number 2 and ending at amino acid residue number 16, the sequence starting at amino acid residue number 3 and ending at amino acid residue number 17, and so forth. It will be appreciated that the invention also provides polypeptides that contain an amino acid sequence that is greater than 15 amino acid residues (e.g., 16, 17, 18, 19, 20, 21, 22, 23, 24, 25, 26, 27, 28, 29, 30 or more amino acid residues) in length and identical to any portion of an amino acid sequence listed or otherwise disclosed herein For example, the invention provides polypeptides that contain a 25 amino acid sequence identical to any 25 amino acid sequence of an amino acid sequence listed or otherwise disclosed herein including, without limitation, the sequence starting at amino acid residue number 1 and ending at amino acid residue number 25, the sequence starting at amino acid residue number 2 and ending at amino acid residue number 26, the sequence starting at amino acid residue number 3 and ending at amino acid residue number 27, and so forth. Additional examples include, without limitation, polypeptides that contain an amino acid sequence that is 50 or more amino acid residues (e.g., 100, 150, 200, 250, 300 or more amino acid residues) in length and identical to any portion of an amino acid sequence listed or otherwise disclosed herein. Further, it is appreciated that, per above, a 15 nucleotide sequence will provide a 5 amino acid sequence, so that the latter, and higher-length amino acid sequences, may be defined by the above-described nucleotide sequence lengths having identity with a sequence provided herein.

[0175] In addition, the invention provides polypeptides that an amino acid sequence having a variation of the amino acid sequence set forth in an amino acid sequence listed or otherwise disclosed herein. For example, the invention provides polypeptides containing an amino acid sequence listed or otherwise disclosed herein that contains a single insertion, a single deletion, a single substitution, multiple insertions, multiple deletions, multiple substitutions, or any combination thereof (e.g., single deletion together with multiple insertions). Such polypeptides can contain an amino acid sequence that shares at least 60, 65, 70, 75, 80, 85, 90, 95, 97, 98 or 99 percent sequence identity with an amino acid sequence listed or otherwise disclosed herein. A particular variant amino acid sequence may comprise any number of variations as well as any combination of types of variations.

[0176] As indicated herein, polypeptides having a variant amino acid sequence can retain enzymatic activity. Such polypeptides can be produced by manipulating the nucleotide sequence encoding a polypeptide using standard procedures such as site-directed mutagenesis or various PCR techniques. As noted herein, one type of modification includes the substitution of one or more amino acid residues for amino acid residues having a similar chemical and/or biochemical property. For example, a polypeptide can have an amino acid sequence set forth in an amino acid sequence listed or otherwise disclosed herein comprising one or more conservative substitutions.

[0177] More substantial changes can be obtained by selecting substitutions that are less conservative, and/or in areas of the sequence that may be more critical, for example selecting residues that differ more significantly in their effect on maintaining: (a) the structure of the polypeptide backbone in the area of the substitution, for example, as a sheet or helical conformation; (b) the charge or hydrophobicity of the polypeptide at the target site; or (c) the bulk of the side chain. The substitutions that in general are expected to produce the greatest changes in polypeptide function are those in which: (a) a hydrophilic residue, e.g., serine or threonine, is substituted for (or by) a hydrophobic residue, e.g., leucine, isoleucine, phenylalanine, valine or alanine; (b) a cysteine or proline is substituted for (or by) any other residue; (c) a residue having an electropositive side chain, e.g., lysine, arginine, or histidine, is substituted for (or by) an electronegative residue, e.g., glutamic acid or aspartic acid; or (d) a residue having a bulky side chain, e.g., phenylalanine, is substituted for (or by) one not having a side chain, e.g., glycine. The effects of these amino acid substitutions (or other deletions or additions) can be assessed for polypeptides having enzymatic activity by analyzing the ability of the polypeptide to catalyze the conversion of the same substrate as the related native polypeptide to the same product as the related native polypeptide. Accordingly, polypeptides having 5, 10, 20, 30, 40, 50 or less conservative substitutions are provided by the invention.

[0178] Polypeptides and nucleic acids encoding polypeptides can be produced by standard DNA mutagenesis techniques, for example, M13 primer mutagenesis. Details of these techniques are provided in Sambrook and Russell, 2001. Nucleic acid molecules can contain changes of a coding region to fit the codon usage bias of the particular organism into which the molecule is to be introduced.

[0179] The invention also provides an isolated nucleic acid that is at least about 12 bases in length (e.g., at least about 13, 14, 15, 16, 17, 18, 19, 20, 25, 30, 40, 50, 60, 100, 250, 500, 750, 1000, 1500, 2000, 3000, 4000, or 5000 bases in length) and hybridizes, under hybridization conditions, to the sense or antisense strand of a nucleic acid having a sequence listed or otherwise disclosed herein. The hybridization conditions can be moderately or highly stringent hybridization conditions. Also, in some embodiments the microorganism comprises an endogenous chemical productproduction pathway (which may, in some such embodiments, be enhanced), whereas in other embodiments the microorganism does not comprise a chemical product production pathway, but is provided with one or more nucleic acid sequences encoding polypeptides having enzymatic activity or activities to complete a pathway, described herein, resulting in production of a selected chemical product. In some embodiments, the particular sequences disclosed herein, or conservatively modified variants thereof, are provided to a selected microorganism, such as selected from one or more of the species and groups of species or other taxonomic groups listed herein.

### VI. METABOLIC PATHWAYS

[0180] FIG. 1 diagrammatically depicts a cell showing key enzymatic conversion steps that include production of malonyl-CoA. In this figure enzyme functions are indicated by indicated enzymatic conversions and/or representative E. coli gene identifiers that encode proteins (polypeptides) having such enzyme functions (except that mcr indicates non-E. coli malonyl-CoA reductase), deletions are shown by the standard “A” before the respective gene identifier, and increased enzymatic activities are shown by underlining (noting that additional targets for modifications are as indicated in the embedded table of the figure). Genes in parentheses are possible substitutes for or supplements of an enzyme encoded by another gene also shown along the respective pathway step. Disrupted pathways also are shown by an “X” and the transient or partially disrupted step from malonyl-CoA to Fatty Acid-ACP is shown by a dashed “X.” Also, the use of fabI(ts) represents a substitution for the native non-temperature-sensitive gene, thus the dashed X shape over the enzymatic conversion step is meant to indicate that a modification of this step may be made so that the enzymatic conversion is reduced, reduced under certain conditions, etc. This is not meant to be limiting; as described elsewhere there are a number of approaches to control and limit flux to fatty acyl-ACP and other intermediates or products of a fatty acid synthase pathway. Also, in this and various other figures, the use of “glucose” as a carbon source is exemplary and not meant to be limiting; pathways for other carbon sources to feed into the indicated pathways may be substituted.

[0181] The insert box of FIG. 1 provides a list, not to be limiting, of additional optional genetic modifications that may be made to the host cell to further improve chemical product biosynthesis under various culture conditions.

[0182] It is important to note that malonyl-CoA may be a substrate for a fatty acid synthase system such as that shown in FIG. 2A, which utilizes malonyl-CoA and produces fatty acids that are used for cell membranes and other cellular requirements. Also shown in FIG. 2A are E. coli gene names for genes that encode various steps of this representative fatty acid synthase (also referred to as fatty acid synthesis) pathway, the circular portion of which exemplifies fatty acid elongation. FIGS. 2B-D are provided to show fatty acid initiation reactions in greater detail (some of which are depicted in FIG. 2A). The gene names are not meant to be limiting, and are only exemplary. Table 3 provides enzyme function and corresponding EC numbers.

[0183] FIG. 2A also depicts a metabolic competition between utilization of malonyl-CoA for fatty acid synthesis (lower part of diagram) versus for production of polyketides and other malonyl-CoA-based chemical products, and also for production of 3-HP (which may be converted after biosynthesis to acrylic acid and other chemicals and products). Without being bound to a particular theory, when flux can be diverted from fatty acid synthesis that consumes malonyl-CoA, more malonyl-CoA may become available for biosynthesis of a desired chemical product of commercial interest (other than a fatty acid, a phospholipid, etc.). FIG. 2A also identifies certain inhibitors selected pathway steps, and certain feedback inhibition by metabolic intermediates (shown by a “Tee” shape extending from the inhibitor or metabolic intermediate to the inhibited step).

[0184] It is noteworthy that for purposes of the present invention, although traditionally fatty acid synthesis is often viewed to start with acetyl-CoA carboxylase, which produces malonyl-CoA, for the purposes of the present invention, as is clear from FIG. 2A and other teachings herein, modulation to decrease one or more, two or more, or three or more enzymatic functions of the fatty acid synthesis pathways downstream of malonyl-CoA are of interest to increase availability of malonyl-CoA for biosynthesis of the chemical products disclosed herein. Also, as taught herein, the genetic modification(s) and/or other system modifications (e.g., addition of an inhibitor) to modulate these enzymatic functions (i.e., enzymatic conversion steps) may be combined with various genetic modification(s) to increase production of and/or flux through malonyl-CoA, including increasing net activity (whether by increasing gene copy numbers, increasing activity, using a mutant form, etc.) of acetyl-coA carboxylase. The basis for this is observable in FIG. 2A, since malonyl-CoA is the product of this enzyme (ACCase being the abbreviation for acetyl [symbol] CoA carboxylase in FIG. 2A).

[0185] CoA means coenzyme A; MSA means malonate semialdehyde; mcr means malonyl-CoA reductase (which may be monofunctional, reacting only malonyl [symbol] CoA to MSA, or bifunctional, reacting this and also MSA to 3-HP (one bifunctional form being from Chloroflexus auriantiacus)); and ACP means acyl carrier protein. Also, representative (not to be limiting) gene names for E. coli genes that encode enzymes that carry out the indicated enzymatic conversion steps are provided. Table 3 provides additional information about these enzymatic conversion steps, which is incorporated into FIG. 2A.

[0186] FIG. 3 shows various chemicals that may be derived from 3-HP. This is not meant to be limiting, and it is known that numerous products may be produced from each of these chemicals that may be derived from 3-HP.

[0187] Such products are referred to herein as 3-HP derivative products. Various reactions to obtain these and other chemical products from these are described in Ulmann's Encyclopedia of Industrial Chemistry, Acrylic Acid and Derivatives, Wiley VCH Verlag GmbH, Wienham (2005), incorporated by reference for its teachings of conversion reactions to these chemical products, and products derived from these, including for acrylic acid and its derivatives.

[0188] It is within the scope of the present invention to have a method of making any of the chemical compounds disclosed herein, including those in the preceding paragraph, that includes biosynthesis of malonyl-CoA as taught herein, wherein the malonyl-CoA is thereafter converted to a chemical product by the cell (e.g. 3-HP), and optionally thereafter converted to another chemical product such as those in or made from those in FIG. 3.

[0189] As indicated above, it was unexpected that particular combinations of modifications of fatty acid synthase pathway genes, such as modifications that transiently lower enzymatic function at elevated culture temperature or deletion of a gene encoding an enzyme of the pathway, would increase chemical product of mcA, 3-HP biosynthesis (such as measured by specific productivity). Particular combinations of such genetic modifications are described below, including in the examples, which are incorporated into this section.

[0190] Further, it has been found that combining genetic modifications directed to different metabolic effects in a host cell leads to greater production of a selected chemical product. In various embodiments, at least one genetic modification along a pathway to a selected chemical product is combined with one or more, two or more, or three or more, genetic modifications that are effective to reduce the overall activity and/or flux through one or more, two or more, or three or more, enzymatic conversion steps of a host cell's fatty acid synthase pathway. The enzymatic functions that catalyze the enzymatic conversions steps of the representative fatty acid synthase pathway, depicted in FIG. 2A, are summarized in Table 3, with reference to sequence listing numbers that correspond to representative DNA and amino acid sequences for these enzymatic functions in E. coli. These may be modified in accordance with embodiments of the invention.

TABLE 3

| | Enzyme | | |
|---|---|---|---|
| Enzyme Function(s) | Commission (EC) | | |
| (with synonyms) | Number | Names of | SEQ ID NO. of |
| malonyl-CoA-acyl | 2.3.1.39 | fabD | 007 |
| carrier protein | | | |
| transacylase | | | |
| B ketoacyl-acyl carrier | 2.3.41.41 | fabF | 008 |
| protein synthase II, B- | | | |
| ketoacyl-ACP synthase | | | |
| II, 3-oxoacyl-ACP | | | |
| synthas | | | |
| II, KASII, acyl-[acyl | | | |
| carrier protein]:malonyl- | | | |
| [acyl carrier protein] C- | | | |
| acyltransferase | | | |
| (decarboxylating), | | | |
| B-ketoacyl-ACP | | fabB | 009 |
| synthase, -ketoacyl-acyl | | | |
| carrier protein synthase | | | |
| I, 3-oxoacyl-ACP- | | | |
| synthase I, KASI | | | |
| B-ketoacyl-acyl carrier | | fabH | 010 |
| protein synthase III, B- | | | |
| ketoacyl-ACP synthase | | | |
| III, 3-oxoacyl-ACP | | | |
| synthase III, KASIII | | | |
| B-ketoacyl-[acyl-carrier | 1.1.1.100 | fabG | 011 |
| protein] reductase; 3- | | | |
| oxoacyl-[acyl-carrier- | | | |
| protein] reductase | | | |
| B-hydroxyacl-ACP | 4.2.1.59 | fabZ | 012 |
| dehydratase, 3- | | fabA | 013 |
| hydroxyacyl-[acp] | | | |
| dehydratase | | | |
| enoyl-ACP reductase | 1.3.1.9; 1.3.1.10 | fabI | 014 |
| (NADH), enoyl-acyl | | | |
| carrier protein (ACP) | | | |
| reductase | | | |

[0191] While not meant to be limiting one approach to modification is to use a temperature sensitive mutant of one or more of the above polypeptides. For example, a temperature-sensitive FabB is known, having the following mutation: A329V. Also, a temperature-sensitive FabI is known, having the following mutation: (S241F). Either or both of these may be combined with other modifications, such as a deletion of FabF. Non-limiting examples of such combinations are provided in the Examples section in strains having other indicated genetic modifications including introduction of specific plasmids.

[0192] It also is noted that any combination of modifications to reduce activity along the fatty acid synthesis pathway downstream of malonyl-CoA may include one or more modifications of the polypeptides that are responsible for enzymatic conversion steps shown in FIGS. 2B-D.

[0193] As noted herein, various aspects of the present invention are directed to a microorganism cell that comprises a metabolic pathway from malonyl-CoA to a chemical product of interest, such as those described above, and means for modulating conversion of malonyl-CoA to fatty acyl molecules (which thereafter may be converted to fatty acids) also are provided. Then, when the means for modulating modulate to decrease such conversion, a proportionally greater number of malonyl-CoA molecules are 1) produced and/or 2) converted via the metabolic pathway from malonyl-CoA to the chemical product. In various embodiments, additional genetic modifications may be made, such as to 1) increase intracellular bicarbonate levels, such as by increasing carbonic anhydrase, 2) increase enzymatic activity of acetyl-CoA carboxylase, and NADPH-dependent transhydrogenase, 3) increase production of coenzyme A.

[0194] In various embodiments the production of a selected chemical product is not linked to microorganism growth, that is to say, there are non-growth coupled embodiments in which production rate is not linked metabolically to cellular growth. For example, a microbial culture may be brought to a desired cell density, followed by a modulation (such as temperature shift of a temperature-sensitive protein) resulting in less malonyl-CoA being converted to fatty acids (generally needed for growth) and thus more to production of a selected chemical product.

[0195] Other additional genetic modifications are disclosed herein for various embodiments.

[0196] Included among additional genetic modifications are genetic modifications directed to reduce (including eliminate) flux through and/or activity of enzymes in the glyoxylate bypass of the microorganism, for example one or more of malate synthase, isocitrate lyase, and isocitrate dehydrogenase kinase-phosphatase. Such modification has been demonstrated to substantially reduce the flux of carbon through oxaloacetate generated via the glyoxylate bypass shunt. For example, in E. coli a deletion of the operon identified as aceBAK may be made.

[0197] More generally embodiments of the invention comprise a modification to reduce production of undesired metabolic products, which may be selected from various amino acids and other metabolic products, said modification resulting in a reduction (including elimination) of enzymatic activity of or an enzyme of or controlling flux through the glyoxylate bypass, optionally further selected from one or more of malate synthase A, isocitrate lyase, and kinase-phosphatase that controls activity of an isocitrate dehydrogenase.

[0198] As one example, not to be limiting, a deletion may be made to aceBAK in an E. coli strain that comprises other genetic modifications taught herein. One example of an E. coli strain comprising such deletion is:

TABLE 4

| Strain | Parent | Genotype | Plasmid(s) |
|---|---|---|---|
| BX3_547 | BX_0775.0 | F-, Δ(araD-araB)567, ΔlacZ4787(::rrnB-3), | pTRC-kan-PyibD- |
| | | LAM-, rph-1, Δ(rhaD-rhaB)568, hsdR514, | mcr, pACYC-CAT- |
| | | ΔldhA::frt, ΔpflB::frt, ΔmgsA::frt, ΔpoxB::frt, | accADBC/pntAB |
| | | Δpta-ack::frt, fabI(ts) (S241F)-zeoR, fabB(ts), | |
| | | ΔfabF::frt, coaA*, fabD(ts), ΔaceBAK::frt | |

[0199] Genotype traits denoted in bold italic font are present in the BW25113 host strain (available from the Coli Genetic Stock Center, Yale University, New Haven, Conn. USA). Additional genotype traits denoted in normal font were engineered by the inventors using standard methods as described and/or referenced herein. Parent BX_{—}0775.0 is E. coli BW25113 (modifications shown in bold italic font) to which the other genetic modifications in the above genotype were made by methods described elsewhere herein.

[0200] Strain BX3_{—}547 also comprises the plasmids identified in the above table. In pTRC-kan-PyibD-mcr, a promoter for malonyl-CoA reductase that is operative under low phosphate conditions. Phosphate starvation inducible promoters located upstream of native E. coli yibD and ytfK genes have been identified (Yoshida, et al., J Microbiol, 49(2), pp 285-289, 2010). The target promoter sequence was ordered (Integrated DNA Technologies, Coralville, Iowa USA) including with modifications to the native ribosome binding site to be compatible with existing expression vectors and to accommodate expression of key downstream gene(s) within the vector(s) (see examples).

[0201] Strain BX3_{—}547 was evaluated under various fermentation conditions that modulated or otherwise controlled temperature, pH, oxygen concentration, glucose feed rate and concentration, and other media conditions. Among the parameters used to determine other process steps, low ambient phosphate concentration was used as a control point that lead to temperature shift from approximately 30° C. to approximately 37° C. A promoter sensitive to low ambient phosphate was utilized to control expression of the gene encoding malonyl-CoA reductase in the plasmid identified as pTrc-PyibD-mcr (SEQ ID NO:170). Also, during one or more evaluations, any one or more of dissolved oxygen, redox potential, aeration rate, agitation rate, oxygen transfer rate, and oxygen utilization rate was/were used to control the system and/or measured.

[0202] Strain BX3_{—}547 was evaluated over 36 fermentation events that were conducted over an 8 week period using FM11 medium (described in the Common Methods Section). Duration of the fermentation events were all less than 80 hours, of which a portion was after temperature increase to effectuate reduced enzymatic activity of fabI(ts), fabB(ts), and fabD(ts). While not meant to be particularly limiting in view of other genetic modifications and culture conditions that may be employed, these results demonstrated microbial performance over a range of reduced oxygen conditions, with final 3-HP titers ranging between 50 and 62 grams of 3-HP/liter of final culture media volume.

[0203] It is appreciated that the PyibD promoter, or a similar low-phosphate induction promoter, could be utilized in a genetic construct to induce any one or more of the sequences described and/or taught herein, so as to enable production of any other of the chemical products disclosed herein, including in the examples provided herein.

[0204] In various embodiments, expression of desired genes is induced when the environmental phosphate concentration is maintained or adjusted to a low, more particularly, an effectively low concentration. This may be achieved, for example, by introduction of a promoter induced by low phosphate concentration for promotion of one or more nucleic acid sequences of interest. For example, increased production of a desired chemical product may result when environmental phosphate concentration is at or less than a concentration effective for the increased production, including but not limited to when phosphate concentration is not detectable by standard analytical techniques. One example of a low phosphate promoter that may be used with such embodiments is the PyibD promoter, exemplified such as by SEQ ID NO:169.

[0205] Further, various embodiments of the invention accordingly are directed to methods, compositions and systems that regard culturing modified microorganisms, such as those comprising a low-phosphate inducible enzyme such as described above, in a two-phase approach, the first phase substantially to increase microorganism biomass and the second phase substantially to produce a desired product (such as but not limited to 3-HP).

[0206] To constructe pTRC-kan-PyibD-mcr, the promoter from E. coli yibD, with nearby native sequences and selected restriction sites, was synthesized (Integrated DNA Technologies). Also, changes to the native ribosome binding site were made to accommodate appropriate expression of MCR:

(SEQ ID NO: 211)
CACGTGCGTAATTGTGCTGATCTCTTATATAGCTGCTCTCATTATCTCTC
TACCCTGAAGTGACTCTCTCACCTGTAAAAATAATATCTCACAGGCTTAA
TAGTTTCTTAATACAAAGCCTGTAAAACGTCAGGATAACTTCTGTGTAGG
AGGATAATCCATGGAATTCCGCACGTG

[0207] This sequence as provided in pTrc-PyibD-mcr to induce mcr is as follows:

(SEQ ID NO: 210)
GTGCGTAATTGTGCTGATCTCTTATATAGCTGCTCTCATTATCTCTCTAC
CCTGAAGTGACTCTCTCACCTGTAAAAATAATATCTCACAGGCTTAATAG
TTTCTTAATACAAAGCCTGTAAAACGTCAGGATAACTTCTGTGTAGGAGG
ATAATC.

[0208] The Examples further describes the construction of the plasmid pTrc-PyibD-mcr (SEQ ID NO:170).

[0209] Strain BX3_{—}547 also comprises coaA*, a pantothenate kinase which is refractory to feedback inhibition. An exemplary sequence of such coaA* is SEQ ID NO:173. CoaA* R106A Mutant Sequence (SEQ ID NO:173) is provided below. This coaA* mutant also is provided in other strains listed in Table 6.

(SEQ ID NO: 173)
ATGAGTATAAAAGAGCAAACGTTAATGACGCCTTACCTACAGTTTGACCG
CAACCAGTGGGCAGCTCTGCGTGATTCCGTACCTATGACGTTATCGGAAG
ATGAGATCGCCCGTCTCAAAGGTATTAATGAAGATCTCTCGTTAGAAGAA
GTTGCCGAGATCTATTTACCTTTGTCACGTTTGCTGAACTTCTATATAAG
CTCGAATCTGCGCCGTCAGGCAGTTCTGGAACAGTTTCTTGGTACCAACG
GGCAACGCATTCCTTACATTATCAGTATTGCTGGCAGTGTCGCGGTGGGG
AAAAGTACAACGGCGGCTGTGCTCCAGGCGCTATTAAGCCGTTGGCCGGA
ACATCGTCGTGTTGAACTGATCACTACAGATGGCTTCCTTCACCCTAATC
AGGTTCTGAAAGAACGTGGTCTGATGAAGAAGAAAGGCTTCCCGGAATCG
TATGATATGCATCGCCTGGTGAAGTTTGTTTCCGATCTCAAATCCGGCGT
GCCAAACGTTACAGCACCTGTTTACTCACATCTTATTTATGATGTGATCC
CGGATGGAGATAAAACGGTTGTTCAGCCTGATATTTTAATTCTTGAAGGG
TTAAATGTCTTACAGAGCGGGATGGATTATCCACACGATCCACATCATGT
ATTTGTTTCTGATTTTGTCGATTTTTCGATATATGTTGATGCACCGGAAG
ACTTACTTCAGACATGGTATATCAACCGTTTTCTGAAATTCCGCGAAGGG
GCTTTTACCGACCCGGATTCCTATTTTCATAACTACGCGAAATTAACTAA
AGAAGAAGCGATTAAGACTGCCATGACATTGTGGAAAGAGATCAACTGGC
TGAACTTAAAGCAAAATATTCTACCTACTCGTGAGCGCGCCAGTTTAATC
CTGACGAAAAGTGCTAATCATGCGGTAGAAGAGGTCAGACTACGCAAAT
AA

[0210] It is appreciated that the particular constructs in these examples, and the product obtained (3-HP), are not meant to be limiting. In various embodiments genetic constructs, microorganisms, methods and systems are produced and/or employed that comprise and utilize induction under low environmental phosphate conditions. Any of the products described herein, including those in Tables 1A-1H may be produced using a microorganism that comprises a modification that leads to induction of one or more enzymes under low phosphate conditions. Increased production of a selected chemical product may be obtained when phosphate concentration is maintained or adjusted to a low, more particularly, an effectively low concentration. This may be achieved, for example, by introduction of a promoter induced by low phosphate concentration for promotion of one or more nucleic acid sequences of interest. For example, increased production of a desired chemical product may result when environmental phosphate concentration is at or less than a concentration effective for the increased production, including but not limited to when phosphate concentration is not detectable by standard analytical techniques. One example of a low phosphate promoter is the PyibD promoter, exemplified such as by SEQ ID NO:210. This aspect of the invention may be combined, in any combination, with any of the other aspects of the invention taught herein.

[0211] Unexpected increases in specific productivity by a population of a genetically modified microorganism may be achieved in methods and systems in which that microorganism has a microbial production pathway from malonyl-CoA to a selected chemical product as well as a reduction in the enzymatic activity of a selected enzyme of the microorganism's fatty acid synthase system (more particularly, its fatty acid elongation enzymes). In various embodiments, specific supplements to a bioreactor vessel comprising such microorganism population may also be provided to further improve the methods and systems.

[0212] In various embodiments one or more, two or more, or three or more, enzymatic conversion steps of a host cell's pathway(s) to biosynthesize coenzyme-A (“CoA”, “coA”, “Co-A” or “co-A”) are modified to increase cellular production of CoA. This further increases chemical product biosynthesis when combined with either or both of the two types of genetic modifications just described—regarding increasing production of a chemical product and toward reducing fatty acid synthase pathway activities/flux.

[0213] Accordingly, in various embodiments of the invention, to more effectively redirect malonyl-CoA from fatty acid synthesis and toward the biosynthesis of such a desired chemical product, genetic modifications are made to:
[0214] (a) increase production along the biosynthetic pathway that includes malonyl-CoA and leads to a desired chemical product;
[0215] (b) reduce the activity of one or more, or of two or more, or of three or more of enoyl-acyl carrier protein (ACP) reductase, B-ketoacyl-acyl carrier protein synthase I (such as fabB), B-ketoacyl-acyl carrier protein synthase II, and malonyl-CoA-acyl carrier protein transacylase; and optionally to c. increase the production of coenzyme A in the microorganism cell.

[0216] In various microorganisms conversion of the metabolic intermediate malonyl-CoA to fatty acids via a fatty acid synthase (also referred to by “synthesis”) system (also referred to as “pathway” or “complex”) is the only or the major use of malonyl-CoA. A representative fatty acid synthase pathway known to function in microorganisms is depicted in FIG. 2A. This has a cyclic component by which fatty acid molecules are elongated to a final length; these may thereafter be further modified to phospholipids, etc., which are used in cell membranes and other cellular functions.

[0217] It has been determined that when a production pathway to an alternative chemical product exists in a microorganism, reducing such conversion of malonyl-CoA to fatty acids can improve metrics for production of that alternative chemical product (e.g., a polyketide or 3-HP). For example, as depicted in FIG. 2A and listed in Table 3, in many microorganism cells the fatty acid synthase system comprises polypeptides that have the following enzymatic activities: malonyl-CoA-acyl carrier protein (ACP) transacylase; B-ketoacyl-ACP synthase; B-ketoacyl-ACP reductase; B-hydroxyacyl-ACP dehydratase; 3-hydroxyacyl-(acp) dehydratase; and enoyl-acyl carrier protein reductase (enoyl-ACP reductase). In various embodiments nucleic acid sequences that encode temperature-sensitive forms of these polypeptides may be introduced in place of the native enzymes, and when such genetically modified microorganisms are cultured at elevated temperatures (at which these thermolabile polypeptides become inactivated, partially or completely, due to alterations in protein structure or complete denaturation), there is observed an increase in a product such as 3-HP, THN, or flaviolin. In other embodiments other types of genetic modifications may be made to otherwise modulate, such as lower, enzymatic activities of one or more of these polypeptides. In various embodiments a result of such genetic modifications is to shift malonyl-CoA utilization so that there is a reduced conversion of malonyl-CoA to fatty acids, overall biomass, and proportionally greater conversion of carbon source to a chemical product such as 3-HP. In various embodiments, the specific productivity for the microbially produced chemical product is unexpectedly high. Also, additional genetic modifications, such as to increase malonyl-CoA production, may be made for certain embodiments.

[0218] In various embodiments genetic modifications are made to reduce the overall function, whether measureable as enzymatic activity, enzyme concentration, and/or flux, of two or more, or of three or more, of the enzymatic functions of a host cell's fatty acid synthase pathway. These may be combined with other types of genetic modifications described herein, such as to a chemical product pathway and/or to genetic modifications that result in greater production of coenzyme A.

[0219] Accordingly, in some embodiments the present invention comprises a genetically modified microorganism that comprises at least one genetic modification that provides, completes, or enhances a chemical production pathway effective to convert malonyl-CoA to a chemical product, and further comprises at least two, or at least three genetic modifications of at least two, or at least three enzymes of the fatty acid synthase system of a host cell, such as selected from enoyl-acyl carrier protein reductase (enoyl-ACP reductase) or enoyl-coenzyme A reductase (enoyl-CoA reductase), B-ketoacyl-ACP synthase or B-ketoacyl-CoA synthase, malonyl-CoA-ACP, where such latter genetic modifications have a cumulative effect to reduce conversion of malonyl-CoA to fatty acids. Other genetic modifications may be provided to such host cell as described elsewhere herein. The latter include those depicted in FIG. 1, such as but not limited to a genetic modification of carbonic anhydrase to increase bicarbonate levels in the microorganism cell (and/or a supplementation of its culture medium with bicarbonate and/or carbonate), and one or more genetic modifications to increase enzymatic activity of one or more of acetyl-CoA carboxylase and NADPH-dependent transhydrogenase. Related methods and systems utilize such any of such genetically modified microorganisms.

[0220] Also, as noted, the invention may comprise, in various embodiments, one or more genetic modifications that result in greater production of coenzyme A. Such genetic modification may be to any of the genes encoding enzymes along the pathways leading to production of coenzyme A. For example, FIGS. 4A-D depict representative biosynthetic pathways (and portions thereof) that lead to coenzyme A. Any of the genes encoding these enzymes may be modified to increase respective enzymatic conversion step activity and/or flux in order to increase coenzyme A production in a host cell. In a particular embodiment, one or more, two or more, or three or more genetic modifications may be made to achieve this end. Table 5 summarizes the enzymatic conversions shown in FIGS. 4A-D.

TABLE 5

| | | Gene Name |
|---|---|---|
| Enzyme Function | E.C. Classification | in E. coli |
| aspartate transaminase | 2.6.1.1 | aspC |
| aspartate 1-decarboxylase | 4.1.1.11 | panD |
| acetolactate synthase | 2.2.1.6 | ilvH, ilvi |
| 2,3-dihydroxy- | 1.1.1.86 | ilvC |
| isovalerate:NADP+ | | |
| oxidoreductase (isomerizing) | | |
| 2,3-dihydroxy-isovalerate | 4.2.1.9 | ilvD |
| dehydratase | | |
| 3-methyl-2-oxobutanoate | 2.1.2.11 | panB |
| 2-dehydropantoate | 1.1.1.169 | panE |
| pantothenate synthetase | 6.3.2.1 | pane |
| pantothenate kinase | 2.7.1.33 | coaA (panK) |
| phosphopantothenoylcysteine | 6.3.2.5 | dfp |
| synthetase | | |
| 4′- | 4.1.1.36 | dfp |
| phosphopantothenoylcysteine | | |
| decarboxylase | | |
| phosphopantetheine | 2.7.7.3 | coaD |
| adenylytransferase | | |
| Dephospho-CoA kinase | 2.7.1.24 | coaE |

[0221] A plurality of strains are described in the Examples section, hereby incorporated into this section. In addition, the following table lists additional strains of value in production of chemical products such as 3-HP and related chemicals. For construction of these strains, generally all plasmids were introduced at the same time via electroporation using standard methods. Transformed cells were grown on the appropriate media with antibiotic supplementation and colonies were selected based on their appropriate growth on the selective media. The base strains were derived from E. coli BW25113 (F-, Δ(araD-araB)567, ΔlacZ4787(::rrnB-3), lamba-, rph-1, Δ(rhaD-rhaB)568, hsdR514), these strains comprising additional chromosomal modifications generally introduced using Gene Bridges technology as described herein, such as in the Common Methods Section. Temperature-sensitive mutant forms are designated herein by “ts” or “(ts),” either of which may be as a superscript.

TABLE 6

| Strain | Background | Genotype | Plasmids |
|---|---|---|---|
| BX3_0451.0 | BX_0701.0 | F-, Δ(araD-araB)567, | pTRC-KAN-mcr, |
| | | ΔlacZ4787(::rrnB-3), LAM-, | pACYC-CAT- |
| | | rph-1, Δ(rhaD-rhaB)568, | accADBC/pntAB |
| | | hsdR514,, ΔldhA:frt, | |
| | | ΔpflB:frt, | |
| | | ΔmgsA:frt, ΔpoxB:frt, Δpta- | |
| | | ack:frt, fabI^{ts} (S241F)-zeoR, | |
| | | Δalda::CSC | |
| BX3_0467 | BX_00704.0 | F-, Δ(araD-araB)567, | pTRC-KAN-mcr, |
| | | ΔlacZ4787(::rrnB-3), LAM-, | pACYC-CAT- |
| | | rph-1, Δ(rhaD-rhaB)568, | accADBC/pntAB |
| | | hsdR514,, ΔldhA::frt, | |
| | | ΔpflB::frt, ΔmgsA::frt, | |
| | | ΔpoxB::frt, Δpta-ack::frt, | |
| | | fabIts (S241F)-zeoR, | |
| | | ΔfabF::frt | |
| BX3_0472 | BX_00706.0 | F-, Δ(araD-araB)567, | pTRC-KAN-mcr, |
| | | ΔlacZ4787(::rrnB-3), LAM-, | pACYC-CAT- |
| | | rph-1, Δ(rhaD-rhaB)568, | accADBC/pntAB |
| | | hsdR514,, ΔldhA::frt, | |
| | | ΔpflB::frt, ΔmgsA::frt, | |
| | | ΔpoxB::frt, Δpta-ack::frt, | |
| | | fabIts (S241F)-zeoR, fabBts, | |
| | | ΔfabF::frt | |
| BX3_0478 | BX_00725.0 | F-, Δ(araD-araB)567, | pTRC-KAN-mcr, |
| | | ΔlacZ4787(::rrnB-3), LAM-, | pACYC-CAT- |
| | | rph-1, Δ(rhaD-rhaB)568, | accADBC/pntAB |
| | | hsdR514,, ΔldhA:frt, | |
| | | ΔpflB:frt, | |
| | | ΔmgsA:frt, ΔpoxB:frt, Δpta- | |
| | | ack:frt, fabI^{ts} (S241F)-zeoR, | |
| | | coaA* | |
| BX3_0491.0 | BX_0726.0 | F-, Δ(araD-araB)567, | pTRC-KAN-mcr, |
| | | ΔlacZ4787(::rrnB-3), LAM-, | pACYC-CAT- |
| | | rph-1, Δ(rhaD-rhaB)568, | accADBC/pntAB |
| | | hsdR514,, ΔldhA::frt, | |
| | | ΔpflB::frt, | |
| | | ΔmgsA::frt, ΔpoxB::frt, Δpta- | |
| | | ack::frt, fabIts (S241F)-zeoR, | |
| | | fabDts | |
| BX3_0492.0 | BX_0735.0 | F-, Δ(araD-araB)567, | pTRC-KAN-mcr, |
| | | ΔlacZ4787(::rrnB-3), LAM-, | pACYC-CAT- |
| | | rph-1, Δ(rhaD-rhaB)568, | accADBC/pntAB |
| | | hsdR514,, ΔldhA::frt, | |
| | | ΔpflB::frt, ΔmgsA::frt, | |
| | | ΔpoxB::frt, Δpta-ack::frt, | |
| | | fabIts (S241F)-zeoR, fabBts, | |
| | | ΔfabF::frt, coaA* | |
| BX3_0495.0 | BX0746.0 | F-, Δ(araD-araB)567, | pTRC-KAN-mcr, |
| | | ΔlacZ4787(::rrnB-3), LAM-, | pACYC-CAT- |
| | | rph-1, Δ(rhaD-rhaB)568, | accADBC/pntAB |
| | | hsdR514, ΔldhA::frt, | |
| | | ΔpflB::frt, ΔmgsA::frt, | |
| | | ΔpoxB::frt, Δpta-ack::frt, | |
| | | fabI(ts)-(S241F)-zeoR, | |
| | | fabB(ts), ΔfabF::frt, fabD(ts) | |
| BX3_0494.0 | BX_0738.0 | F-, Δ(araD-araB)567, | pTRC-KAN-mcr, |
| | | ΔlacZ4787(::rrnB-3), LAM-, | pACYC-CAT- |
| | | rph-1, Δ(rhaD-rhaB)568, | accADBC/pntAB |
| | | hsdR514,, ΔldhA::frt, | |
| | | ΔpflB::frt, ΔmgsA::frt, | |
| | | ΔpoxB::frt, Δpta-ack::frt, | |
| | | fabIts (S241F)-zeoR, fabBts, | |
| | | ΔfabF::frt, coaA*, fabDts | |
| BX3_0501.0 | BX_0728.0 | F-, Δ(araD-araB)567, | pTRC-KAN-ptrc- |
| | | ΔlacZ4787(::rrnB-3), LAM-, | mcr-gapA, |
| | | rph-1, Δ(rhaD-rhaB)568, | pACYC-CAT- |
| | | hsdR514,, ΔldhA::frt, | accADBC/pntAB- |
| | | ΔpflB::frt, | ccdAB |
| | | ΔmgsA::frt, ΔpoxB::frt, Δpta- | |
| | | ack::frt, fabIts (S241F)-zeoR, | |
| | | ΔgapA::frt | |
| BX3_0537.0 | BX_0775.0 | F-, Δ(araD-araB)567, | pTRC-KAN-ptrc- |
| | | ΔlacZ4787(::rrnB-3), LAM-, | mcr, pACYC-CAT- |
| | | rph-1, Δ(rhaD-rhaB)568, | accADBC/pntAB |
| | | hsdR514,, ΔldhA::frt, | |
| | | ΔpflB::frt, ΔmgsA::frt, | |
| | | ΔpoxB::frt, Δpta-ack::frt, | |
| | | fabIts (S241F)-zeoR, fabBts, | |
| | | ΔfabF::frt, coaA*, fabDts, | |
| | | ΔaceBAK::frt | |
| BX3_0538.0 | BX_0775.0 | F-, Δ(araD-araB)567, | pTRC-KAN-ptrc- |
| | | ΔlacZ4787(::rrnB-3), LAM-, | mcr-gapA, |
| | | rph-1, Δ(rhaD-rhaB)568, | pACYC-CAT- |
| | | hsdR514,, ΔldhA::frt, | accADBC/pntAB- |
| | | ΔpflB::frt, ΔmgsA::frt, | ccdAB |
| | | ΔpoxB::frt, Δpta-ack::frt, | |
| | | fabIts (S241F)-zeoR, fabBts, | |
| | | ΔfabF::frt, coaA*, fabDts, | |
| | | ΔaceBAK::frt | |
| BX3_0547.0 | BX_0775.0 | F-, Δ(araD-araB)567, | pTRC-KAN- |
| | | ΔlacZ4787(::rrnB-3), LAM-, | PyibD--mcr, |
| | | rph-1, Δ(rhaD-rhaB)568, | pACYC-CAT- |
| | | hsdR514,, ΔldhA::frt, | accADBC/pntAB |
| | | ΔpflB::frt, ΔmgsA::frt, | |
| | | ΔpoxB::frt, Δpta-ack::frt, | |
| | | fabIts (S241F)-zeoR, fabBts, | |
| | | ΔfabF::frt, coaA*, fabDts, | |
| | | ΔaceBAK::frt | |

[0222] The genetic modifications described and exemplified herein may be provided in various combinations in a microorganism strain so as to achieve a desired improvement in production rate, yield, and final titer of a selected chemical product. Various embodiments of the invention additionally may comprise a genetic modification to increase the availability of the cofactor NADPH, which can increase the NADPH/NADP+ ratio as may be desired. Non-limiting examples for such genetic modification are pgi (E.C. 5.3.1.9, in a mutated form), pntAB (E.C. 1.6.1.2), overexpressed, gapA (E.C. 1.2.1.12):gapN (E.C. 1.2.1.9, from Streptococcus mutans) substitution/replacement (including replacement in a plasmid), and disrupting or modifying a soluble transhydrogenase such as sthA (E.C. 1.6.1.2), and/or genetic modifications of one or more of zwf (E.C. 1.1.1.49), gnd (E.C. 1.1.1.44), and edd (E.C. 4.2.1.12). Sequences of these genes are available at <<www.metacyc.org>>, and also are available at <<www.ncbi.gov>> as well as <<www.ecocyc.org>>.

[0223] Polypeptides, such as encoded by the various specified genes, may be NADH- or NADPH dependent, and methods known in the art may be used to convert a particular enzyme to be either form. More particularly, as noted in WO 2002/042418, “any method can be used to convert a polypeptide that uses NADPH as a cofactor into a polypeptide that uses NADH as a cofactor such as those described by others (Eppink et al., J. Mol. Biol., 292 (1): 87-96 (1999), Hall and Tomsett, Microbiology, 146 (Pt 6): 1399-406 (2000), and Dohr et al., Proc. Natl. Acad. Sci., 98 (1): 81-86 (2000).”

[0224] Redirecting Malonyl-CoA from Fatty Acid Synthesis to a Chemical Product

[0225] Compositions of the present invention, such as genetically modified microorganisms, comprise a production pathway for a chemical product in which malonyl-CoA is a substrate, and may also comprise one or more genetic modifications to reduce the activity of enzymes encoded by one or more of the fatty acid synthetase system genes. The compositions may be used in the methods and systems of the present invention.

[0226] Regarding microbial fermentation of a number of chemical products in many microorganisms of commercial fermentation interest, malonyl-CoA is a metabolic intermediate that, under normal growth conditions, is converted to fatty acids and derivatives thereof, such as phospholipids, that are then used in cell membranes and for other key cellular functions. For example, in Escherichia coli, the fatty acid synthase system is a type II or dissociated fatty acid synthase system. In this system the enzymes of fatty acid production pathway are encoded by distinct genes, and, common for many critical metabolic pathways, is well-regulated, including by downstream products inhibiting upstream enzymes.

[0227] In various microorganisms conversion of the metabolic intermediate malonyl-CoA to fatty acids via a fatty acid synthesis system (i.e., pathway or complex) is the only or the major use of malonyl-CoA. It has been determined that when a production pathway to an alternative chemical product exists in a microorganism, reducing such conversion of malonyl-CoA to fatty acids can improve metrics for production of that alternative chemical product (e.g., a polyketide or 3-HP). For example, in many microorganism cells the fatty acid synthase system comprises polypeptides that have the following enzymatic activities: malonyl-CoA-acyl carrier protein (ACP) transacylase; β-ketoacyl-ACP synthase; β-ketoacyl-ACP reductase; β-hydroxyacyl-ACP dehydratase; 3-hydroxyacyl-(acp) dehydratase; and enoyl-acyl carrier protein reductase (enoyl-ACP reductase). In various embodiments nucleic acid sequences that encode temperature-sensitive forms of these polypeptides may be introduced in place of the native enzymes, and when such genetically modified microorganisms are cultured at elevated temperatures (at which these thermolabile polypeptides become inactivated, partially or completely, due to alterations in protein structure or complete denaturation), there is observed an increase in a product such as 3-HP THN or flaviolin. In other embodiments other types of genetic modifications may be made to otherwise modulate, such as lower, enzymatic activities of one or more of these polypeptides. In various embodiments a result of such genetic modifications is to shift malonyl-CoA utilization so that there is a reduced conversion of malonyl-CoA to fatty acids, overall biomass, and proportionally greater conversion of carbon source to a chemical product such as 3-HP. In various embodiments, the specific productivity for the microbially produced chemical product is unexpectedly high. Also, additional genetic modifications, such as to increase malonyl-CoA production, may be made for certain embodiments.

[0228] One enzyme, enoyl(acyl carrier protein) reductase (EC No. 1.3.1.9, also referred to as enoyl-ACP reductase) is a key enzyme for fatty acid biosynthesis from malonyl-CoA. In Escherichia coli this enzyme, FabI, is encoded by the gene fabI (See “Enoyl-Acyl Carrier Protein (fabI) Plays a Determinant Role in Completing Cycles of Fatty Acid Elongation in Escherichia coli,” Richard J. Heath and Charles 0. Rock, J. Biol. Chem. 270:44, pp. 26538-26543 (1995), incorporated by reference for its discussion of fabI and the fatty acid synthase system).

[0229] The present invention may utilize a microorganism that is provided with a nucleic acid sequence (polynucleotide) that encodes a polypeptide having enoyl-ACP reductase enzymatic activity that may be modulated during a fermentation event. For example, a nucleic acid sequence encoding a temperature-sensitive enoyl-ACP reductase may be provided in place of the native enoyl-ACP reductase, so that an elevated culture temperature results in reduced enzymatic activity, which then results in a shifting utilization of malonyl-CoA to production of a desired chemical product. At such elevated temperature the enzyme is considered non-permissive, as is the temperature. One such sequence is a mutant temperature-sensitive fabI (fabI(TS)) of E. coli, SEQ ID NO:28 for DNA, SEQ ID NO:29 for protein.

[0230] It is appreciated that nucleic acid and amino acid sequences for enoyl-ACP reductase in species other than E. coli are readily obtained by conducting homology searches in known genomics databases, such as BLASTN and BLASTP. Approaches to obtaining homologues in other species and functional equivalent sequences are described herein. Accordingly, it is appreciated that the present invention may be practiced by one skilled in the art for many microorganism species of commercial interest.

[0231] Other approaches than a temperature-sensitive enoyl-ACP reductase may be employed as known to those skilled in the art, such as, but not limited to, replacing a native enoyl-ACP or enoyl-CoA reductase with a nucleic acid sequence that includes an inducible promoter for this enzyme, so that an initial induction may be followed by no induction, thereby decreasing enoyl-ACP or enoyl-CoA reductase enzymatic activity after a selected cell density is attained.

[0232] In some aspects, compositions, methods and systems of the present invention shift utilization of malonyl-CoA in a genetic modified microorganism, which comprises at least one enzyme of the fatty acid synthase system, such as enoyl-acyl carrier protein reductase (enoyl-ACP reductase) or enoyl-coenzyme A reductase (enoyl-CoA reductase), β-ketoacyl-ACP synthase or β-ketoacyl-CoA synthase malonyl-CoA-ACP, and may further comprise at least one genetic modification of nucleic acid sequence encoding carbonic anhydrase to increase bicarbonate levels in the microorganism cell and/or a supplementation of its culture medium with bicarbonate and/or carbonate, and may further comprise one or more genetic modifications to increase enzymatic activity of one or more of acetyl-CoA carboxylase and NADPH-dependent transhydrogenase. More generally, addition of carbonate and/or bicarbonate may be used to increase bicarbonate levels in a fermentation broth.

[0233] In some aspects, the present invention comprises a genetically modified microorganism that comprises at least one genetic modification that provides, completes, or enhances a 3-HP production pathway effective to convert malonyl-CoA to 3-HP, and further comprises a genetic modification of carbonic anhydrase to increase bicarbonate levels in the microorganism cell and/or a supplementation of its culture medium with bicarbonate and/or carbonate, and may further comprise one or more genetic modifications to increase enzymatic activity of one or more of acetyl-CoA carboxylase and NADPH-dependent transhydrogenase. Related methods and systems utilize such genetically modified microorganism.

[0234] In some aspects, the present invention comprises a genetically modified microorganism that comprises at least one genetic modification that provides, completes, or enhances a 3-HP production pathway effective to convert malonyl-CoA to 3-HP, and further comprises a genetic modification of at least one enzyme of the fatty acid synthase system, such as enoyl-acyl carrier protein reductase (enoyl-ACP reductase) or enoyl-coenzyme A reductase (enoyl-CoA reductase), β-ketoacyl-ACP synthase or β-ketoacyl-CoA synthase, malonyl-CoA-ACP, and may further comprise a genetic modification of carbonic anhydrase to increase bicarbonate levels in the microorganism cell and/or a supplementation of its culture medium with bicarbonate and/or carbonate, and may further comprise one or more genetic modifications to increase enzymatic activity of one or more of acetyl-CoA carboxylase and NADPH-dependent transhydrogenase. Related methods and systems utilize such genetically modified microorganism.

[0235] In some aspects, the present invention comprises a genetically modified microorganism that comprises at least one genetic modification that provides, completes, or enhances a 3-HP production pathway effective to convert malonyl-CoA to 3-HP, and further comprises a genetic modification of carbonic anhydrase to increase bicarbonate levels in the microorganism cell and/or a supplementation of its culture medium with bicarbonate and/or carbonate, and may further comprise one or more genetic modifications to increase enzymatic activity of one or more of acetyl-CoA carboxylase and NADPH-dependent transhydrogenase.

[0236] In some aspects, the present invention comprises a genetically modified microorganism that comprises at least one genetic modification that provides, completes, or enhances a 3-HP production pathway effective to convert malonyl-CoA to 3-HP, and further comprises a genetic modification of at least one enzyme of the fatty acid synthase system, such as enoyl-acyl carrier protein reductase (enoyl-ACP reductase) or enoyl-coenzyme A reductase (enoyl-CoA reductase), β-ketoacyl-ACP synthase or β-ketoacyl-CoA synthase, malonyl-CoA-ACP, and may further comprise a genetic modification of carbonic anhydrase to increase bicarbonate levels in the microorganism cell and/or a supplementation of its culture medium with bicarbonate and/or carbonate, and may

[0237] In various embodiments the present invention is directed to a method of making a chemical product comprising: providing a selected cell density of a genetically modified microorganism population in a vessel, wherein the genetically modified microorganism comprises a production pathway for production of a chemical product from malonyl-CoA; and reducing enzymatic activity of at least one enzyme of the genetically modified microorganism's fatty acid synthase pathway.

[0238] In various embodiments, reducing the enzymatic activity of an enoyl-ACP reductase in a microorganism host cell results in production of 3-HP at elevated specific and volumetric productivity. In still other embodiments, reducing the enzymatic activity of an enoyl-CoA reductase in a microorganism host cell results in production of 3-HP at elevated specific and volumetric productivity.

[0239] Another approach to genetic modification to reduce enzymatic activity of these enzymes is to provide an inducible promoter that promotes one such enzyme, such as the enoyl-ACP reductase gene (e.g., fabI in E. coli). In such example this promoter may be induced (such as with isopropyl-u-D-thiogalactopyranoiside (IPTG)) during a first phase of a method herein, and after the IPTG is exhausted, removed or diluted out the second step, of reducing enoyl-ACP reductase enzymatic activity, may begin. Other approaches may be applied to control enzyme expression and activity such as are described herein and/or known to those skilled in the art.

[0240] While enoyl-CoA reductase is considered an important enzyme of the fatty acid synthase system, genetic modifications may be made to any combination of the polynucleotides (nucleic acid sequences) encoding the polypeptides exhibiting the enzymatic activities of this system, such as are listed herein. For example, FabB, β-ketoacyl-acyl carrier protein synthase I, is an enzyme in E. coli that is essential for growth and the biosynthesis of both saturated and unsaturated fatty acids. Inactivation of FabB results in the inhibition of fatty acid elongation and diminished cell growth as well as eliminating a futile cycle that recycles the malonate moiety of malonyl-ACP back to acetyl-CoA. FabF, β-ketoacyl-acyl carrier protein synthase II, is required for the synthesis of saturated fatty acids and the control membrane fluidity in cells. Both enzymes are inhibited by cerulenin.

[0241] It is reported that overexpression of FabF results in diminished fatty acid biosynthesis. It is proposed that FabF outcompetes FabB for association with FabD, malonyl-CoA:ACP transacylase. The association of FabB with FabD is required for the condensation reaction that initiates fatty acid elongation. (See Microbiological Reviews, September 1993, p. 522-542 Vol. 57, No. 3; K. Magnuson et al., “Regulation of Fatty Acid Biosynthesis in Escherichia coli,” American Society for Microbiology; W. Zha et al., “Improving cellular malonyl-CoA level in Escherichia coli via metabolic engineering,” Metabolic Engineering 11 (2009) 192-198). An alternative to genetic modification to reduce such fatty acid synthase enzymes is to provide into a culture system a suitable inhibitor of one or more such enzymes. This approach may be practiced independently or in combination with the genetic modification approach. Inhibitors, such as cerulenin, thiolactomycin, and triclosan (this list not limiting) or genetic modifications directed to reduce activity of enzymes encoded by one or more of the fatty acid synthetase system genes may be employed, singly or in combination.

[0242] Without being bound to a particular theory, it is believed that reducing the enzymatic activity of enoyl-ACP reductase (and/or of other enzymes of the fatty acid synthase system) in a microorganism leads to an accumulation and/or shunting of malonyl-CoA, a metabolic intermediate upstream of the enzyme, and such malonyl-CoA may then be converted to a chemical product for which the microorganism cell comprises a metabolic pathway that utilizes malonyl-CoA. In certain compositions, methods and systems of the present invention the reduction of enzymatic activity of enoyl-ACP reductase (or, more generally, of the fatty acid synthase system) is made to occur after a sufficient cell density of a genetically modified microorganism is attained. This bi-phasic culture approach balances a desired quantity of catalyst, in the cell biomass which supports a particular production rate, with yield, which may be partly attributed to having less carbon be directed to cell mass after the enoyl-ACP reductase activity (and/or activity of other enzymes of the fatty acid synthase system) is/are reduced. This results in a shifting net utilization of malonyl-CoA, thus providing for greater carbon flux to a desired chemical product.

[0243] In various embodiments of the present invention the specific productivity is elevated and this results in overall rapid and efficient microbial fermentation methods and systems. In various embodiments the volumetric productivity also is substantially elevated.

[0244] In various embodiments a genetically modified microorganism comprises a metabolic pathway that includes conversion of malonyl-CoA to a desired chemical product, 3-hydroxypropionic acid (3-HP). This is viewed as quite advantageous for commercial 3-HP production economics and is viewed as an advance having clear economic benefit.

[0245] In various embodiments a genetically modified microorganism comprises a metabolic pathway that includes conversion of malonyl-CoA to a selected chemical product, selected from various polyketides such as those described herein. This is viewed as quite advantageous for commercial production economics for such polyketide chemical products and is viewed as an advance having clear economic benefit. Other chemical products also are disclosed herein.

[0246] The improvements in both specific and volumetric productivity parameters are unexpected and advance the art.

[0247] The reduction of enoyl-ACP reductase activity and/or of other enzymes of the fatty acid synthase system may be achieved in a number of ways, as is discussed herein.

[0248] By “means for modulating” the conversion of malonyl-CoA to fatty acyl-ACP or fatty acyl-CoA molecules, and to fatty acid molecules, is meant any one of the following: 1) providing in a microorganism cell at least one polynucleotide that encodes at least one polypeptide having activity of one of the fatty acid synthase system enzymes (such as recited herein), wherein the polypeptide so encoded has (such as by mutation and/or promoter substitution, etc., to lower enzymatic activity), or may be modulated to have (such as by temperature sensitivity, inducible promoter, etc.) a reduced enzymatic activity; 2) providing to a vessel comprising a microorganism cell or population an inhibitor that inhibits enzymatic activity of one or more of the fatty acid synthase system enzymes (such as recited herein), at a dosage effective to reduce enzymatic activity of one or more of these enzymes. These means may be provided in combination with one another. When a means for modulating involves a conversion, during a fermentation event, from a higher to a lower activity of the fatty acid synthetase system, such as by increasing temperature of a culture vessel comprising a population of genetically modified microorganism comprising a temperature-sensitive fatty acid synthetase system polypeptide (e.g., enoyl-ACP reductase), or by adding an inhibitor, there are conceived two modes—one during which there is higher activity, and a second during which there is lower activity, of such fatty acid synthetase system. During the lower activity mode, a shift to greater utilization of malonyl-CoA to a selected chemical product may proceed.

[0249] Once the modulation is in effect to decrease the noted enzymatic activity(ies), each respective enzymatic activity so modulated may be reduced by at least 10, at least 20, at least 30, at least 40, at least 50, at least 60, at least 70, at least 80, or at least 90 percent compared with the activity of the native, non-modulated enzymatic activity (such as in a cell or isolated). Similarly, the conversion of malonyl-CoA to fatty acyl-ACP or fatty acyl-CoA molecules may be reduced by at least 10, at least 20, at least 30, at least 40, at least 50, at least 60, at least 70, at least 80, or at least 90 percent compared with such conversion in a non-modulated cell or other system. Likewise, the conversion of malonyl-CoA to fatty acid molecules may be reduced by at least 10, at least 20, at least 30, at least 40, at least 50, at least 60, at least 70, at least 80, or at least 90 percent compared with such conversion in a non-modulated cell or other system.

[0250] Also Table 7 below provides additional information regarding genes and sequences that may be used in various embodiments of the invention. Information in this table is incorporated into the respective examples below.

TABLE 7

| | E.C. | |
|---|---|---|
| Enzyme Function | Classification | Gene Name(s) |
| Phloroglucinol reductase | 1.3.1.57 | phloroglucinol reductase |
| | | Eubacterium oxidoreducens |
| | | 041). |
| 6-methylsalicylic-acid | 2.3.1.165 | 6-MSAS |
| synthase | | |
| crotonyl-CoA reductase | 1.3.1.86 | ccr |
| acyl-coA thioesterase I | 3.1.1.5 | tesA |
| butanol dehydrogenase/ | 1.2.1.— | adhE2 |
| butanal dehydrogenase | | |
| isobutanol | 1.2.1.— | adhE |
| dehydrogenase/isobutanal | | |
| Butyryl-CoA | 1.3.8.1 | bcd |
| dehydrogenase | | |
| Electron transfer | 1.3.8.1 | etfAB |
| flavoprotein | | |
| phosphotransbutyrylase | 2.3.1.19 | ptb |
| butyrate kinase | 2.7.2.7 | bukl |
| (S)-3-hydroxybutyryl- | 1.1.1.35 | hbd |
| CoA dehydrogenase | | |
| 3-hydroxybutyryl-CoA | 4.2.1.55 | crt |
| dehydratase | | |
| (R)-3-hydroxybutyryl- | 1.1.1.100 | phaB |
| CoA dehydrogenase | | |
| acetyl-coA | 2.3.1.9 | phaA |
| acetyltransferase | | |
| Polyhydroxybutyrate | 2.3.1.— | phaC |
| polymerase | | |
| 3-ketoacyl-CoA thiolase | 2.3.1.16 | fall |
| Enoyl-CoA | 4.2.1.17/5.1.2.3 | fadJ |
| hydratase/3- | | |
| hydroxybutyryl-CoA | | |
| epimerase | | |
| trans-2-enoyl-CoA | 1.3.1.44 | ter |
| reductase (NAD+) | | |
| butanoyl-CoA/ | | |
| 2-methylpropanoyl- | 5.4.99.13 | icmA, icmB |
| CoA mutase | | |
| phloroisovalerophenone | 2.3.1.156 | VPS |
| synthase | | |
| Acyl-coA | 1.3.99 | acdH |
| dehydrogenase | | |
| Hydroxymethylglutaryl- | 2.3.3.10 | hmgS |
| CoA synthase | | |
| HMG-CoA reductase 1 | 1.1.1.34 | HMG1 |
| HMG-CoA reductase 1 | 1.1.1.34 | HMG2 |
| short chain enoyl-CoA | 4.2.1.17 | ECHS1 |
| hydratase | | |
| 3-hydroxyisobutyryl- | 3.1.2.4 | Hibch |
| CoA hydrolase | | |
| enoyl-CoA hydratase | 4.2.1.17 | ech |
| Phosphoenolpyruvate | 4.1.1.31 | ppc |
| carboxylase | | |
| citrate synthase | 2.3.3.1 | gltA |
| phosphoenolpyruvate | 4.1.1.49 | pck/pckA |
| carboxykinase | | |

[0251] As to ph1D, the sequence listing is provided below:

(SEQ ID NO: 161)
phld> MSTLCLPHVM FPQHKITQQQ MVDHLENLHA
DHPRMALAKR MIANTEVNER HLVLPIDELA VHTGFTHRSI
VYEREARQMS SAAARQAIEN AGLQISDIRM VIVTSCTGFM
MPSLTAHLIN DLALPTSTVQ LPIAQLGCVA GAAAINRAND
FARLDARNHV LIVSLEFSSL CYQPDDTKLH AFISAALFGD
AVSACVLRAD DQAGGFKIKK TESYFLPKSE HYIKYDVKDT
GFHFTLDKAV MNSIKDVAPV MERLNYESFE QNCAHNDFFI
FHTGGRKILD ELVMHLDLAS NRVSQSRSSL SEAGNIASW
VFDVLKRQFD SNLNRGDIGL LAAFGPGFTA EMAVGEWTA

[0252] Production Pathway from Malonyl-CoA to 3-HP

[0253] In various embodiments the compositions, methods and systems of the present invention involve inclusion of a metabolic production pathway that converts malonyl-CoA to a chemical product of interest.

[0254] As one example, 3-HP is selected as the chemical product of interest.

[0255] Further as to specific sequences for 3-HP production pathway, malonyl-CoA reductase (mcr) from C. aurantiacus was gene synthesized and codon optimized by the services of DNA 2.0. The FASTA sequence is shown in SEQ ID NO:15 (gi142561982IgbIAAS20429.11 malonyl-CoA reductase (Chloroflexus aurantiacus)).

[0256] Mcr has very few sequence homologs in the NCBI data base. Blast searches finds 8 different sequences when searching over the entire protein. Hence development of a pile-up sequences comparison is expected to yield limited information. However, embodiments of the present invention nonetheless may comprise any of these eight sequences, shown herein and identified as SEQ ID NOs: 42 to 49, which are expected to be but are not yet confirmed to be bi-functional as to this enzymatic activity. Other embodiments may comprise mutated and other variant forms of any of SEQ ID NOs: 42 to 49, as well as polynucleotides (including variant forms with conservative and other substitutions), such as those introduced into a selected microorganism to provide or increase 3-HP production therein.

[0257] The portion of a CLUSTAL 2.0.11 multiple sequence alignment identifies these eight sequences with respective SEQ ID NOs: 15, 42-49, as shown in the following table.

TABLE 8

| | Seq | |
|---|---|---|
| Reference Nos. | ID No | Genus Species |
| gi142561982IgbIAAS20429.1 | 15 | Chloroflexus aurantiacus |
| gi11638481651reflYP_001636209 | 42 | Chloroflexus aurantiacus |
| | | J-10-fl |
| giI2198481671reflYP_002462600 | 43 | Chloroflexus aggregans |
| | | DSM 9485 |
| gi11567428801reflYP_001433009 | 44 | Roseiflexus castenholzii |
| | | DSM 13941 |
| gi11486573071reflYP_001277512 | 45 | Roseiflexus sp. RS-1 |
| gi185708113IreflZP_01039179.1 | 46 | Erythrobacter sp. NAP1 |
| gi1254282228IreflZP_04957196.1 | 47 | gamma proteobacterium |
| | | NOR51-B |
| gi1254513883IreflZP_05125944.1 | 48 | gamma proteobacterium |
| | | NOR5-3 |
| gi11195043131reflZP_01626393.1 | 49 | 3marine gamma |
| | | proteobacterium HTCC208 |

[0258] Malonyl-CoA may be converted to 3-HP in a microorganism that comprises one or more of the following:

[0259] A bi-functional malonyl-CoA reductase, such as may be obtained from Chloroflexus aurantiacus and other microorganism species. By bi-functional in this regard is meant that the malonyl-CoA reductase catalyzes both the conversion of malonyl-CoA to malonate semialdehyde, and of malonate semialdehyde to 3-HP.

[0260] A mono-functional malonyl-CoA reductase in combination with a 3-HP dehydrogenase. By mono-functional is meant that the malonyl-CoA reductase catalyzes the conversion of malonyl-CoA to malonate semialdehyde.

[0261] Any of the above polypeptides may be NADH- or NADPH-dependent, and methods known in the art may be used to convert a particular enzyme to be either form. More particularly, as noted in WO 2002/042418, “any method can be used to convert a polypeptide that uses NADPH as a cofactor into a polypeptide that uses NADH as a cofactor such as those described by others (Eppink et al., J. Mol. Biol., 292 (1): 87-96 (1999), Hall and Tomsett, Microbiology, 146 (Pt 6): 1399-406 (2000), and Dohr et al., Proc. Natl. Acad. Sci., 98 (1): 81-86 (2001)).”

[0262] Without being limiting, a bi-functional malonyl-CoA reductase may be selected from the malonyl-CoA reductase of Chloroflexus aurantiacus (such as from ATCC 29365) and other sequences. Also without being limiting, a mono-functional malonyl-CoA reductase may be selected from the malonyl-CoA reductase of Sulfolobus tokodaii (SEQ ID NO:83). As to the malonyl-CoA reductase of C. aurantiacus, that sequence and other species' sequences may also be bi-functional as to this enzymatic activity.

[0263] When a mono-functional malonyl-CoA reductase is provided in a microorganism cell, 3-HP dehydrogenase enzymatic activity also may be provided to convert malonate semialdehyde to 3-HP. As shown in the examples, a mono-functional malonyl-CoA reductase may be obtained by truncation of a bi-functional mono-functional malonyl-CoA, and combined in a strain with an enzyme that converts malonate semialdehyde to 3-HP.

[0264] Also, it is noted that another malonyl-CoA reductase is known in Metallosphaera sedula (Msed_{—}709, identified as malonyl-CoA reductase/succinyl-CoA reductase).

[0265] By providing nucleic acid sequences that encode polypeptides having the above enzymatic activities, a genetically modified microorganism may comprise an effective 3-HP pathway to convert malonyl-CoA to 3-HP in accordance with the embodiments of the present invention.

[0266] Other 3-HP pathways, such as those comprising an aminotransferase (see, e.g., WO 2010/011874, published Jan. 28, 2010), may also be provided in embodiments of a genetically modified microorganism of the present invention.

[0267] Incorporated into this section, the present invention provides for elevated specific and volumetric productivity metrics as to production of a selected chemical product, such as 3-hydroxypropionic acid (3-HP). In various embodiments, production of a chemical product, such as 3-HP, is not linked to growth.

[0268] In various embodiments, production of 3-HP, or alternatively one of its downstream products such as described herein, may reach at least 1, at least 2, at least 5, at least 10, at least 20, at least 30, at least 40, and at least 50 g/liter titer, such as by using one of the methods disclosed herein.

[0269] As may be realized by appreciation of the advances disclosed herein as they relate to commercial fermentations of selected chemical products, embodiments of the present invention may be combined with other genetic modifications and/or method or system modulations so as to obtain a microorganism (and corresponding method) effective to produce at least 10, at least 20, at least 30, at least 40, at least 45, at least 50, at least 80, at least 100, or at least 120 grams of a chemical product, such as 3-HP, per liter of final (e.g., spent) fermentation broth while achieving this with specific and/or volumetric productivity rates as disclosed herein.

[0270] In some embodiments a microbial chemical production event (i.e., a fermentation event using a cultured population of a microorganism) proceeds using a genetically modified microorganism as described herein, wherein the specific productivity is between 0.01 and 0.60 grams of 3-HP produced per gram of microorganism cell on a dry weight basis per hour (g 3-HP/g DCW-hr). In various embodiments the specific productivity is greater than 0.01, greater than 0.05, greater than 0.10, greater than 0.15, greater than 0.20, greater than 0.25, greater than 0.30, greater than 0.35, greater than 0.40, greater than 0.45, or greater than 0.50 g 3-HP/g DCW-hr. Specific productivity may be assessed over a 2, 4, 6, 8, 12 or 24 hour period in a particular microbial chemical production event. More particularly, the specific productivity for 3-HP or other chemical product is between 0.05 and 0.10, 0.10 and 0.15, 0.15 and 0.20, 0.20 and 0.25, 0.25 and 0.30, 0.30 and 0.35, 0.35 and 0.40, 0.40 and 0.45, or 0.45 and 0.50 g 3-HP/g DCW-hr., 0.50 and 0.55, or 0.55 and 0.60 g 3-HP/g DCW-hr. Various embodiments comprise culture systems demonstrating such productivity.

[0271] Also, in various embodiments of the present invention the volumetric productivity achieved may be 0.25 g 3-HP (or other chemical product) per liter per hour (g (chemical product)/L-hr), may be greater than 0.25 g 3-HP (or other chemical product)/L-hr, may be greater than 0.50 g 3-HP (or other chemical product)/L-hr, may be greater than 1.0 g 3-HP (or other chemical product)/L-hr, may be greater than 1.50 g 3-HP (or other chemical product)/L-hr, may be greater than 2.0 g 3-HP (or other chemical product)/L-hr, may be greater than 2.50 g 3-HP (or other chemical product)/L-hr, may be greater than 3.0 g 3-HP (or other chemical product)/L-hr, may be greater than 3.50 g 3-HP (or other chemical product)/L-hr, may be greater than 4.0 g 3-HP (or other chemical product)/L-hr, may be greater than 4.50 g 3-HP (or other chemical product)/L-hr, may be greater than 5.0 g 3-HP (or other chemical product)/L-hr, may be greater than 5.50 g 3-HP (or other chemical product)/L-hr, may be greater than 6.0 g 3-HP (or other chemical product)/L-hr, may be greater than 6.50 g 3-HP (or other chemical product)/L-hr, may be greater than 7.0 g 3-HP (or other chemical product)/L-hr, may be greater than 7.50 g 3-HP (or other chemical product)/L-hr, may be greater than 8.0 g 3-HP (or other chemical product)/L-hr, may be greater than 8.50 g 3-HP (or other chemical product)/L-hr, may be greater than 9.0 g 3-HP (or other chemical product)/L-hr, may be greater than 9.50 g 3-HP (or other chemical product)/L-hr, or may be greater than 10.0 g 3-HP (or other chemical product)/L-hr.

[0272] In some embodiments, specific productivity as measured over a 24-hour fermentation (culture) period may be greater than 0.01, 0.05, 0.10, 0.20, 0.5, 1.0, 2.0, 3.0, 4.0, 5.0, 6.0, 7.0, 8.0, 9.0, 10.0, 11.0 or 12.0 grams of chemical product per gram DCW of microorganisms (based on the final DCW at the end of the 24-hour period).

[0273] In various aspects and embodiments of the present invention, there is a resulting substantial increase in microorganism specific productivity that advances the fermentation art and commercial economic feasibility of microbial chemical production, such as of 3-HP (but not limited thereto).

[0274] Stated in another manner, in various embodiments the specific productivity exceeds (is at least) 0.01 g chemical product/g DCW-hr, exceeds (is at least) 0.05 g chemical product/g DCW-hr, exceeds (is at least) 0.10 g chemical product/g DCW-hr, exceeds (is at least) 0.15 g chemical product/g DCW-hr, exceeds (is at least) 0.20 g chemical product/g DCW-hr, exceeds (is at least) 0.25 g chemical product/g DCW-hr, exceeds (is at least) 0.30 g chemical product/g DCW-hr, exceeds (is at least) 0.35 g chemical product/g DCW-hr, exceeds (is at least) 0.40 g chemical product/g DCW-hr, exceeds (is at least) 0.45 g chemical product/g DCW-hr, exceeds (is at least) 0.50 g chemical product/g DCW-hr, exceeds (is at least) 0.60 g chemical product/g DCW-hr.

[0275] More generally, based on various combinations of the genetic modifications described herein, optionally in combination with supplementations described herein, specific productivity values for 3-HP, and for other chemical products described herein, may exceed 0.01 g chemical product/g DCW-hr, may exceed 0.05 g chemical product/g DCW-hr, may exceed 0.10 g chemical product/g DCW-hr, may exceed 0.15 g chemical product/g DCW-hr, may exceed 0.20 g chemical product/g DCW-hr, may exceed 0.25 g chemical product/g DCW-hr, may exceed 0.30 g chemical product/g DCW-hr, may exceed 0.35 g chemical product/g DCW-hr, may exceed 0.40 g chemical product/g DCW-hr, may exceed 0.45 g chemical product/g DCW-hr, and may exceed 0.50 g or 0.60 chemical product/g DCW-hr. Such specific productivity may be assessed over a 2, 4, 6, 8, 12 or 24 hour period in a particular microbial chemical production event.

[0276] The improvements achieved by embodiments of the present invention may be determined by percentage increase in specific productivity, or by percentage increase in volumetric productivity, compared with an appropriate control microorganism lacking the particular genetic modification combinations taught herein (with or without the supplements taught herein, added to a vessel comprising the microorganism population). For particular embodiments and groups thereof, such specific productivity and/or volumetric productivity improvements is/are at least 10, at least 20, at least 30, at least 40, at least 50, at least 100, at least 200, at least 300, at least 400, and at least 500 percent over the respective specific productivity and/or volumetric productivity of such appropriate control microorganism.

[0277] The specific methods and teachings of the specification, and/or cited references that are incorporated by reference, may be incorporated into the examples. Also, production of 3-HP, or one of its downstream products such as described herein, may reach at least 1, at least 2, at least 5, at least 10, at least 20, at least 30, at least 40, and at least 50 g/liter titer in various embodiments.

[0278] The metrics may be applicable to any of the compositions, e.g., genetically modified microorganisms, methods, e.g., of producing 3-HP or other chemical products, and systems, e.g., fermentation systems utilizing the genetically modified microorganisms and/or methods disclosed herein.

[0279] It is appreciated that iterative improvements using the strategies and methods provided herein, and based on the discoveries of the interrelationships of the pathways and pathway portions, may lead to even greater production of a selected chemical product.

[0280] Any number of strategies may lead to development of a suitable modified enzyme suitable for use in a chemical production pathway. With regard to malonyl-CoA-reductase, one may utilize or modify an enzyme such as encoded by the sequences in the table immediately above, to achieve a suitable level of chemical production capability in a microorganism strain.

[0281] Production Pathway from Malonyl-CoA to 3-HP—Additional Aspects

[0282] In various embodiments the compositions, methods and systems of the present invention involve inclusion of a metabolic production pathway that converts malonyl-CoA to a chemical product of interest. As one example, 3-HP is selected as the chemical product of interest.

[0283] Further as to specific sequences for 3-HP production pathway, malonyl-CoA reductase (mcr) from C. aurantiacus was gene synthesized and codon optimized by the services of DNA 2.0. The FASTA sequence is shown in SEQ ID NO:015 (gi1425619821gbIAAS20429.11 malonyl-CoA reductase (Chloroflexus aurantiacus)).

[0284] Mcr has very few sequence homologs in the NCBI data base. Blast searches finds 8 different sequences when searching over the entire protein. Hence development of a pile-up sequences comparison is expected to yield limited information. However, embodiments of the present invention nonetheless may comprise any of these eight sequences, which are expected to be but are not yet confirmed to be bi-functional as to this enzymatic activity. Other embodiments may comprise mutated and other variant forms of any of these sequences, as well as polynucleotides (including variant forms with conservative and other substitutions), such as those introduced into a selected microorganism to provide or increase 3-HP production therein.

[0285] The portion of a CLUSTAL 2.0.11 multiple sequence alignment identifies these eight sequences as shown in the following table.

| Reference Nos. | Genus Species |
|---|---|
| gii425619821gb I AAS20429.1 | Chloroflexus aurantiacus |
| 811163848165Iref I | Chloroflexus aurantiacus J-10-fl |
| YP_001636209 | |
| 8112198481671ref I | Chloroflexus aggregans DSM 9485 |
| YP_002462600 | |
| 8111567428801ref I | Roseiflexus castenholzii DSM 13941 |
| YP_001433009 | |
| 8111486573071ref I | Roseiflexus sp. RS-1 |
| YP_001277512 | |
| 81185708113Iref I | Erythrobacter sp. NAP1 |
| ZP_01039179.1 | |
| 8112542822281ref I | gamma proteobacterium NOR51-B |
| ZP_04957196.1 | |
| 811254513883Iref I | gamma proteobacterium NOR5-3 |
| ZP_05125944.1 | |
| 8¹1119504313 I ref I | 3marine gamma proteobacterium |
| ZP_01626393.1 | HTCC208 |

[0286] Malonyl-CoA may be converted to 3-HP in a microorganism that comprises one or more of the following:

[0287] A bi-functional malonyl-CoA reductase, such as may be obtained from Chloroflexus aurantiacus and other microorganism species. By bi-functional in this regard is meant that the malonyl-CoA reductase catalyzes both the conversion of malonyl-CoA to malonate semialdehyde, and of malonate semialdehyde to 3-HP.

[0288] A mono-functional malonyl-CoA reductase may be used in combination with a 3-HP dehydrogenase. By mono-functional is meant that the malonyl-CoA reductase catalyzes the conversion of malonyl-CoA to malonate semialdehyde.

[0289] Any of the above polypeptides may be NADH- or NADPH-dependent, and methods known in the art may be used to convert a particular enzyme to be either form. More particularly, as noted in WO 2002/042418, “any method can be used to convert a polypeptide that uses NADPH as a cofactor into a polypeptide that uses NADH as a cofactor such as those described by others (Eppink et al., J. Mol. Biol., 292 (1): 87-96 (1999), Hall and Tomsett, Microbiology, 146 (Pt 6): 1399-406 (2000), and Dohr et al., Proc. Natl. Acad. Sci., 98 (1): 81-86 (2001)).”

[0290] Without being limiting, a bi-functional malonyl-CoA reductase may be selected from the malonyl-CoA reductase of Chloroflexus aurantiacus (such as from ATCC 29365) and other sequences. Also without being limiting, a mono-functional malonyl-CoA reductase may be selected from the malonyl-CoA reductase of Sulfolobus tokodaii. As to the malonyl-CoA reductase of C. aurantiacus, that sequence and other species' sequences may also be bi-functional as to this enzymatic activity.

[0291] When a mono-functional malonyl-CoA reductase is provided in a microorganism cell, 3-HP dehydrogenase enzymatic activity also may be provided to convert malonate semialdehyde to 3-HP. A mono-functional malonyl-CoA reductase may be obtained by truncation of a bi-functional mono-functional malonyl [symbol] CoA, and combined in a strain with an enzyme that converts malonate semialdehyde to 3-HP.

[0292] Also, it is noted that another malonyl-CoA reductase is known in Metallosphaera sedula (Msed_{—}709, identified as malonyl-CoA reductase/succinyl-CoA reductase).

[0293] By providing nucleic acid sequences that encode polypeptides having the above enzymatic activities, a genetically modified microorganism may comprise an effective 3-HP pathway to convert malonyl [symbol] CoA to 3-HP in accordance with the embodiments of the present invention.

[0294] Other 3-HP pathways, such as those comprising an aminotransferase (see, e.g., WO 2010/011874, published Jan. 28, 2010), incorporated by reference herein for such 3-HP pathway teachings, may also be provided in embodiments of a genetically modified microorganism of the present invention.

[0295] Any number of strategies may lead to development of a suitable modified enzyme suitable for use in a 3-HP production pathway. With regard to malonyl-CoA-reductase, one may utilize or modify an enzyme such as encoded by the sequences in the table immediately above, to achieve a suitable level of 3-HP production capability in a microorganism strain.

[0296] Combinations of Genetic Modifications

[0297] In some embodiments, the genetically modified microorganism additionally comprises at least one genetic modification to increase, in the genetically modified microorganism, a protein function selected from the protein functions of Table 9 (Glucose transporter function (such as by galP), pyruvate dehydrogenase Elp, dihydrolipoamide acetyltransferase, and pyruvate dehydrogenase E3). In certain embodiments, the genetically modified microorganism comprises at least one genetic modification to increase two, three, or four protein functions selected from the protein functions of Table 9.

[0298] In some embodiments, such genetically modified microorganism additionally comprises at least one genetic modification to decrease protein functions selected from the protein functions of Table 10, lactate dehydrogenase, pyruvate formate lyase, pyruvate oxidase, phosphate acetyltransferase, histidyl phosphorylatable protein (of PTS), phosphoryl transfer protein (of PTS), and the polypeptide chain (of PTS).

[0299] In various embodiments, such genetically modified microorganism comprises at least one genetic modification to decrease enzymatic activity of two, three, four, five, six, or seven protein functions selected from the protein functions of Table 10. Also, in various embodiments at least one, or more than one, genetic modification is made to modify the protein functions of Table 11 in accordance with the Comments therein.including in Table 11.

[0300] It will be appreciated that, in various embodiments, there can be many possible combinations of increases in one or more protein functions of Table 9, with reductions in one or more protein functions of Table 9 in the genetically modified microorganism comprising at least one genetic modification to provide or increase malonyl-CoA-reductase protein function (i.e, enzymatic activity). Protein functions can be independently varied, and any combination (i.e., a full factorial) of genetic modifications of protein functions in Tables 9, 10, and 11 herein can be adjusted by the methods taught and provided into said genetically modified microorganism.

[0301] In some embodiments, at least one genetic modification to decrease enzymatic activity is a gene disruption. In some embodiments, at least one genetic modification to decrease enzymatic activity is a gene deletion.

[0302] Certain embodiments of the invention additionally comprise a genetic modification to increase the availability of the cofactor NADPH, which can increase the NADPH/NADP+ ratio as may be desired. Non-limiting examples for such genetic modification are pgi (E.C. 5.3.1.9, in a mutated form), pntAB (E.C. 1.6.1.2), overexpressed, gapA (E.C. 1.2.1.12):gapN (E.C. 1.2.1.9, from Streptococcus mutans) substitution/replacement, and disrupting or modifying a soluble transhydrogenase such as sthA (E.C. 1.6.1.2), and/or genetic modifications of one or more of zwf (E.C. 1.1.1.49), gnd (E.C. 1.1.1.44), and edd (E.C. 4.2.1.12). Sequences of these genes are available at <<www.metacyc.org>>. Also, the sequences for the genes and encoded proteins for the E. coli gene names shown in Tables 9, 10, and 11 are provided in U.S. Provisional Patent Application No. 61/246,141, incorporated herein in its entirety and for such sequences, and also are available at <<www.ncbi.gov>> as well as <<www.metacyc.org>> or <<www.ecocyc.org>>.

[0303] In some embodiments, the genetic modification increases microbial synthesis of a selected chemical product above a rate or titer of a control microorganism lacking said at least one genetic modification to produce the selected chemical product. In some embodiments, the genetic modification is effective to increase enzymatic conversions to the selected chemical product by at least about 5 percent, at least about 10 percent, at least about 20 percent, at least about 30 percent, or at least about 50 percent above the enzymatic conversion of a control microorganism lacking the genetic modification.

TABLE 9

| Enzyme Function | E.C. Classification | Gene Name in E. coli |
|---|---|---|
| Glucose | N/A | galP |
| transporter | | |
| Pyruvate | 1.2.4.1 | aceE |
| dehydrogenase Elp | | |
| lipoate | 2.3.1.12 | aceF |
| acetyltransferase/ | | |
| dihydrolipoamide | | |
| acetyltransferase | | |
| Pyruvate | 1.8.1.4 | 1pd |
| dehydrogenase E3 | | |
| (lipoamide | | |
| dehydrogenase) | | |

TABLE 10

| Enzyme | E.C. | |
|---|---|---|
| Function | Classification | Gene Name in E. coli |
| Lactate | 1.1.1.28 | ldhA |
| dehydrogenase | | |
| Pyruvate | 2.3.1.— | pflB |
| formate lyase (B | | |
| “inactive”) | | |
| Pyruvate oxidase | 1.2.2.2 | poxB |
| Phosphate | 2.3.1.8 | Pta |
| acetyltransferase | | |
| Heat stable, | N/A | ptsH (HPr) |
| histidyl | | |
| phosphorylatable | | |
| protein (of PTS) | | |
| Phosphoryl | N/A | ptsl |
| transfer protein | | |
| (of PTS) | | |
| Polypeptide | N/A | Crr |
| chain (of PTS) | | |

TABLE 11

| | | Gene | |
|---|---|---|---|
| | E.C. | Name in | |
| Enzyme Function | Classification | E. coli | Comments |
| 0 ketoacyl-acyl | 2.3.1.179 | fabF | Decrease function, |
| carrier protein | 2.3.1.41 | | including by mutation |
| synthase I 3- | | | |
| 0X0ACYL-ACP- | | | |
| SYNTHASE II | | | |
| MONOMER | | | |
| β-ketoacyl-ACP | 2.3.1.41 | fabB | Decrease function, |
| synthase I, 3- | 2.3.1.— | | including by mutation |
| oxoacyl-ACP- | | | |
| synthase I | | | |
| Malonyl-CoA-ACP | 2.3.1.39 | fabD | Decrease function, |
| transacylase | | | including by mutation |
| enoyl acyl carrier | 1.3.1.9, | fabl | Decrease function, |
| protein reductase | 1.3.1.10 | | including by mutation |
| β-ketoacyl-acyl | 2.3.1.180 | fabH | Decrease function, |
| carrier protein | | | including by mutation |
| synthase III | | | |
| Carboxyl transferase | 6.4.1.2 | accA | Increase function |
| subunit a subunit | | | |
| Biotin carboxyl | 6.4.1.2 | accB | Increase function |
| carrier protein | | | |
| Biotin carboxylase | 6.3.4.14 | accC | Increase function |
| subunit | | | |
| Carboxyl transferase | 6.4.1.2 | accD | Increase function |
| subunit β subunit | | | |
| long chain fatty acyl | 3.1.2.2, | tesA | Increase function |
| thioesterase I | 3.1.1.5 | | |
| GDP | 2.7.6.5 | relA | Decrease function, |
| pyrophosphokinase/ | | | including by mutation |
| GTP | | | |
| pyrophosphokinase | | | |
| GDP | 2.7.6.5, | Spot | Decrease function, |
| diphosphokinase/ | 3.1.7.2 | | including by mutation |
| guanosine-3′,5′- | | | |
| bis(diphosphate) 3′- | | | |
| diphosphatase | | | |

[0304] Further with regard to descrasing enzyme function based on Table 11's teachings, any one or a combination of enzyme functions of the following may be decreased in a particular embodiment combined with other genetic modifications described herein: β-ketoacyl-ACP synthase 1,3-oxoacyl-ACP-synthase I; Malonyl-CoA-ACP transacylase; enoyl acyl carrier protein reductase; and β-ketoacyl-acyl carrier protein synthase III.

[0305] Moreover, in particular embodiments to more effectively redirect malonyl-CoA from fatty acid synthesis and toward the biosynthesis of such a desired chemical product, genetic modifications are made to:
[0306] (a) increase production along the biosynthetic pathway that includes malonyl-CoA and leads to a desired chemical product;
[0307] (b) reduce the activity of one or more, or of two or more, or of three or more of enoyl acyl carrier protein (ACP) reductase, B-ketoacyl-acyl carrier protein synthase I (such as fabB), B-ketoacyl-acyl carrier protein synthase II, and malonyl-CoA-acyl carrier protein transacylase; and optionally
[0308] (c) increase the production of coenzyme A in the microorganism cell.

[0309] Accordingly, as described in various sections above, some compositions, methods and systems of the present invention comprise providing a genetically modified microorganism that comprises both a production pathway to a selected chemical product, and a modified polynucleotide that encodes an enzyme of the fatty acid synthase system that exhibits reduced activity, so that utilization of malonyl-CoA shifts toward the production pathway compared with a comparable (control) microorganism lacking such modifications. The methods involve producing the chemical product using a population of such genetically modified microorganism in a vessel, provided with a nutrient media. Other genetic modifications described herein, to other enzymes, such as acetyl-CoA carboxylase and/or NADPH-dependent transhydrogenase, may be present in some such embodiments. Providing additional copies of polynucleotides that encode polypeptides exhibiting these enzymatic activities is shown to increase production of a selected chemical. Other ways to increase these respective enzymatic activities is known in the art and may be applied to various embodiments of the present invention. SEQ ID NOs for these polynucleotides and polypeptides of E. coli are: acetyl-CoA carboxylase (accABCD, SEQ ID NOs: 30-37); and NADPH-dependent transhydrogenase (SEQ ID NOs: 38-41), also referred to as pyridine nucleotide transhydrogenase, pntAB in E. coli).

[0310] Also, without being limiting, a first step in some multi-phase method embodiments of making a chemical product may be exemplified by providing into a vessel, such as a culture or bioreactor vessel, a nutrient media, such as a minimal media as known to those skilled in the art, and an inoculum of a genetically modified microorganism so as to provide a population of such microorganism, such as a bacterium, and more particularly a member of the family Enterobacteriaceae, such as E. coli, where the genetically modified microorganism comprises a metabolic pathway that converts malonyl-CoA to molecules of a selected chemical. Also, in various embodiments an inoculum of a microorganism of the present invention is cultured in a vessel so that the cell density increases to a cell density suitable for reaching a production level of a selected chemical that meets overall productivity metrics taking into consideration the next step of the method. In various alternative embodiments, a population of these genetically modified microorganisms may be cultured to a first cell density in a first, preparatory vessel, and then transferred to the noted vessel so as to provide the selected cell density. Numerous multi-vessel culturing strategies are known to those skilled in the art. Any such embodiments provide the selected cell density according to the first noted step of the method.

[0311] Also without being limiting, a subsequent step may be exemplified by two approaches, which also may be practiced in combination in various embodiments. A first approach provides a genetic modification to the genetically modified microorganism such that its enoyl-ACP reductase enzymatic activity may be controlled. As one example, a genetic modification may be made to substitute for the native enoyl-ACP reductase a temperature-sensitive mutant enoyl-ACP reductase (e.g., fabEs in E. coli). The latter may exhibit reduced enzymatic activity at temperatures above 30 C but normal enzymatic activity at 30 C, so that elevating the culture temperature to, for example to 34 C, 35 C, 36 C, 37 C or even 42 C, reduces enzymatic activity of enoyl [symbol] ACP reductase. In such case, more malonyl-CoA is converted to 3-HP or another chemical product than at 30 C, where conversion of malonyl-CoA to fatty acids is not impeded by a less effective enoyl-ACP reductase.

[0312] For the second approach, an inhibitor of enoyl-ACP reductase, or another of the fatty acid synthase enzyme, is added to reduce conversion of malonyl-CoA to fatty acids. For example, the inhibitor cerulenin is added at a concentration that inhibits one or more enzymes of the fatty acid synthase system. FIG. 2A depicts relevant pathways and shows three inhibitors thiolactomycin, triclosan, and cerulenin, next to the enzymes that they inhibit. Encircled E. coli gene names indicate a temperature-sensitive mutant is available for the polypeptide encoded by the gene. FIG. 2B provides a more detailed depiction of representative enzymatic conversions and exemplary E. coli genes of the fatty acid synthetase system that was more generally depicted in FIG. 2A. This listing of inhibitors of microorganism fatty acid synthetase enzymes is not meant to be limiting. Other inhibitors, some of which are used as antibiotics, are known in the art and include, but are not limited to, diazaborines such as thienodiazaborine, and, isoniazid.

[0313] In some embodiments, the genetic modification increases microbial synthesis of a selected chemical above a rate or titer of a control microorganism lacking said at least one genetic modification to produce a selected chemical. In some embodiments, the genetic modification is effective to increase enzymatic conversions to a selected chemical by at least about 5 percent, at least about 10 percent, at least about 20 percent, at least about 30 percent, or at least about 50 percent above the enzymatic conversion of a control microorganism lacking the genetic modification.

[0314] Genetic modifications as described herein may include modifications to reduce enzymatic activity of any one or more of: β-ketoacyl-ACP synthase 1,3-oxoacyl-ACP-synthase I; Malonyl-CoA-ACP transacylase; enoyl acyl carrier protein reductase; and β-ketoacyl-acyl carrier protein synthase III.

[0315] Accordingly, as described in various sections above, some compositions, methods and systems of the present invention comprise providing a genetically modified microorganism that comprises both a production pathway to a selected chemical product, such as a selected chemical, and a modified polynucleotide that encodes an enzyme of the fatty acid synthase system that exhibits reduced activity, so that utilization of malonyl-CoA shifts toward the production pathway compared with a comparable (control) microorganism lacking such modifications. The methods involve producing the chemical product using a population of such genetically modified microorganism in a vessel, provided with a nutrient media. Other genetic modifications described herein, to other enzymes, such as acetyl-CoA carboxylase and/or NADPH-dependent transhydrogenase, may be present in some such embodiments. Providing additional copies of polynucleotides that encode polypeptides exhibiting these enzymatic activities is shown to increase a selected chemical production. Other ways to increase these respective enzymatic activities is known in the art and may be applied to various embodiments of the present invention. SEQ ID NOs for these polynucleotides and polypeptides of E. coli are: acetyl-CoA carboxylase (accABCD, SEQ ID NOs: 30-37); and NADPH-dependent transhydrogenase (SEQ ID NOs: 38-41), also referred to as pyridine nucleotide transhydrogenase, pntAB in E. coli).

[0316] Also, without being limiting, a first step in some multi-phase method embodiments of making a chemical product may be exemplified by providing into a vessel, such as a culture or bioreactor vessel, a nutrient media, such as a minimal media as known to those skilled in the art, and an inoculum of a genetically modified microorganism so as to provide a population of such microorganism, such as a bacterium, and more particularly a member of the family Enterobacteriaceae, such as E. coli, where the genetically modified microorganism comprises a metabolic pathway that converts malonyl-CoA to a selected chemical molecules. For example, genetic modifications may include the provision of at least one nucleic acid sequence that encodes a gene encoding the enzyme malonyl-CoA reductase in one of its bi-functional forms, or that encodes genes encoding a mono-functional malonyl-CoA reductase and an NADH- or NADPH-dependent 3-hydroxypropionate dehydrogenase (e.g., ydfG or mmsB from E. coli, or mmsB from Pseudomonas aeruginosa). In either case, when provided into an E. coli host cell, these genetic modifications complete a metabolic pathway that converts malonyl-CoA to a selected chemical. This inoculum is cultured in the vessel so that the cell density increases to a cell density suitable for reaching a production level of a selected chemical that meets overall productivity metrics taking into consideration the next step of the method. In various alternative embodiments, a population of these genetically modified microorganisms may be cultured to a first cell density in a first, preparatory vessel, and then transferred to the noted vessel so as to provide the selected cell density. Numerous multi-vessel culturing strategies are known to those skilled in the art. Any such embodiments provide the selected cell density according to the first noted step of the method.

[0317] Thus, for various embodiments of the invention the genetic manipulations to any pathways described herein also may include various genetic manipulations, including those directed to change regulation of, and therefore ultimate activity of, an enzyme or enzymatic activity of an enzyme identified in any of the respective pathways. Such genetic modifications may be directed to transcriptional, translational, and post-translational modifications that result in a change of enzyme activity and/or selectivity under selected and/or identified culture conditions. Thus, in various embodiments, to function more efficiently, a microorganism may comprise one or more gene deletions. For example, for a particular embodiment in E. coli, the genes encoding lactate dehydrogenase (ldhA), phosphate acetyltransferase (pta), pyruvate oxidase (poxB) and pyruvate-formate lyase (pflB) may be deleted. Additionally, a further deletion or other modification to reduce enzymatic activity, of multifunctional 2-keto-3-deoxygluconate 6-phosphate aldolase and 2-keto-4-hydroxyglutarate aldolase and oxaloacetate decarboxylase (eda in E. coli), may be provided to various strains. Further to the latter, in various embodiments combined with such reduction of enzymatic activity of multifunctional 2-keto-3-deoxygluconate 6-phosphate aldolase and 2-keto-4-hydroxyglutarate aldolase and oxaloacetate decarboxylase (eda in E. coli), further genetic modifications may be made to increase a glucose transporter (e.g. galP in E. coli) and/or to decrease activity of one or more of heat stable, histidyl phosphorylatable protein (of PTS) (ptsH (HPr) in E. coli), phosphoryl transfer protein (of PTS) (ptsl in E. coli), and the polypeptide chain of PTS (Crr in E. coli).

[0318] Gene deletions may be accomplished by mutational gene deletion approaches, and/or starting with a mutant strain having reduced or no expression of one or more of these enzymes, and/or other methods known to those skilled in the art.

[0319] Aspects of the invention also regard provision of multiple genetic modifications to improve microorganism overall effectiveness in converting a selected carbon source into a chemical product such as 3-HP. Particular combinations are shown, such as in the Examples, to increase specific productivity, volumetric productivity, titer and yield substantially over more basic combinations of genetic modifications.

[0320] Further to FIG. 1 genetic modifications, appropriate additional genetic modifications can provide further improved production metrics. Various strains may comprise genetic modifications for a selected chemical, and additional genetic modifications as disclosed herein (including a particular genetic modification regarding the fatty acid synthase system, not to be limiting, such modifications more generally disclosed elsewhere herein). The embodiment of FIG. 1 depicts a number of genetic modifications in combination, however in various embodiments of the present invention other combinations of the genetic modifications of these enzymatic functions may be provided to achieve a desired level of increased rate, titer and yield as to bio-production of a chemical product.

[0321] Additional genetic modifications may be provided in a microorganism strain of the present invention. As one example, a deletion, of multifunctional 2-keto-3-deoxygluconate 6-phosphate aldolase and 2-keto-4-hydroxyglutarate aldolase and oxaloacetate decarboxylase (eda in E. coli), may be provided to various strains.

[0322] For example, the ability to utilize sucrose may be provided, and this would expand the range of feed stocks that can be utilized to produce a selected chemical or other chemical products. Common laboratory and industrial strains of E. coli, such as the strains described herein, are not capable of utilizing sucrose as the sole carbon source. Since sucrose, and sucrose-containing feed stocks such as molasses, are abundant and often used as feed stocks for the production by microbial fermentation, adding appropriate genetic modifications to permit uptake and use of sucrose may be practiced in strains having other features as provided herein. Various sucrose uptake and metabolism systems are known in the art (for example, U.S. Pat. No. 6,960,455), incorporated by reference for such teachings. These and other approaches may be provided in strains of the present invention. The examples provide at least two approaches.

[0323] Also, genetic modifications may be provided to add functionality for breakdown of more complex carbon sources, such as cellulosic biomass or products thereof, for uptake, and/or for utilization of such carbon sources. For example, numerous cellulases and cellulase-based cellulose degradation systems have been studied and characterized (see, for example, and incorporated by reference herein for such teachings, Beguin, P and Aubert, J-P (1994) FEMS Microbial. Rev. 13: 25-58; Ohima, K. et al. (1997) Biotechnol. Genet. Eng. Rev. 14: 365414).

[0324] In addition to the above-described genetic modifications, in various embodiments genetic modifications also are provided to increase the pool and availability of the cofactor NADPH, and/or, consequently, the NADPH/NADP+ ratio. For example, in various embodiments for E. coli, this may be done by increasing activity, such as by genetic modification, of one or more of the following genes—pgi (in a mutated form), pntAB, overexpressed, gapA:gapN substitution/replacement, and disrupting or modifying a soluble transhydrogenase such as sthA, and/or genetic modifications of one or more of zwf, gnd, and edd.

[0325] Any such genetic modifications may be provided to species not having such functionality, or having a less than desired level of such functionality.

[0326] More generally, and depending on the particular metabolic pathways of a microorganism selected for genetic modification, any subgroup of genetic modifications may be made to decrease cellular production of fermentation product(s) selected from the group consisting of acetate, acetoin, acetone, acrylic, malate, fatty acid ethyl esters, isoprenoids, glycerol, ethylene glycol, ethylene, propylene, butylene, isobutylene, ethyl acetate, vinyl acetate, other acetates, 1,4-butanediol, 2,3-butanediol, butanol, isobutanol, sec-butanol, butyrate, isobutyrate, 2-OH-isobutryate, 3-OH-butyrate, ethanol, isopropanol, D-lactate, L-lactate, pyruvate, itaconate, levulinate, glucarate, glutarate, caprolactam, adipic acid, propanol, isopropanol, fusel alcohols, and 1,2-propanediol, 1,3-propanediol, formate, fumaric acid, propionic acid, succinic acid, valeric acid, and maleic acid. Gene deletions may be made as disclosed generally herein, and other approaches may also be used to achieve a desired decreased cellular production of selected fermentation products.

[0327] Elongase Pathway

[0328] In various embodiments an elongase is used in a metabolic pathway to produce a selected chemical product. The following paragraphs are provided to describe elongases and their utilization.

[0329] Trypanosoma brucei, a eukaryotic human parasite, is known to evade the host immune response by synthesizing a specific surface coating comprised of glycoproteins tethered to fatty acids anchored into the membrane. To accommodate the surface coating, T. brucei produces large quantities of the anchor molecule, which is composed exclusively of C14 saturated fatty acid (myristic acid). Myristic acid synthesis in T. brucei is initiated by the formation of butyryl-CoA and utilizes membrane-bound elongation enzymes, similar to those typically used to extend fatty acids, to condense malonyl-CoA with the growing acyl chain. This particular ELO system esterifies the growing fatty acid chain to CoA rather than ACP like the bacterial and other microbial counterparts (see Lee et al, Cell 126, 691-699, 2006 and Cronan, Cell, 126, 2006). This is in contrast to typical bacterial fatty acid elongation which is initiated following the formation of acetoacetyl acyl-ACP from malonyl-ACP. Microbial fatty acid synthesis is then catalysed in the cytosol by multiple soluble proteins, each responsible for a single reaction where the growing fatty acid chain is esterified to an acyl carrier protein (ACP). The carbon-donor molecule is a malonyl-ACP which extends the growing carbon chain length by 2 carbons at a time.

[0330] A proposed elongase-utilizing pathway (see FIG. 6) builds from PHB and n-butanol production pathways. The first committed step requires the formation of acetoacetyl-CoA, which is traditionally catalysed by either the b-ketothiolase (phaA) or acetyl-CoA acetyltransferase (atoB) using 2 acetyl-CoA molecules as a substrate. A recently reported malonyl-CoA dependent route for synthesis of acetoacetyl-CoA in Streptomyces sp. has been cloned and expressed in E. coli (Okamura, et al., PNAS, 107, 25, 2010). When considered with other aspects of the invention, including those increasing malonyl-CoA pools and fluxes, this reaction appears to provide an attractive alternative to the common route to acetoacetyl-CoA formation, which is an unfavorable reaction, preferring the hydrolysis of acetoacetyl-coA The novel enzyme, nphT7, catalyzes the irreversible reaction to form acetoacetyl-CoA from malonyl-CoA and acetyl-CoA and would allow for two driving forces towards acetoacetyl-CoA production (irreversibility and release of CO2). The protein and oligonucleotide sequences for NphT7 (AB540131.1 GI:299758081) are provided below (SEQ ID NOs: 159; 160):

SEQ ID NO: 159
MTDVRFRIIGTGAYVPERIVSNDEVGAPAGVDDDWITRKTGIRQRRWAAD
DQATSDLATAAGRAALKAAGITPEQLTVIAVATSTPDRPQPPTAAYVQHH
LGATGTAAFDVNAVCSGTVFALSSVAGTLVYAGGYALVIGADLYSRILNP
ADRKTVVLFGDGAGAMVLGPTSTGTGPIVRAVALHTEGGLTDLIRVPAGG
SRQPLDTDGLDAGLQYFAMDGREVRREVTEHLPQLIKGFLHEAGVDAADI
SHFVPHQANGVMLDEVEGELHLPRATMHRTVETYGNTGAASIPITMDAAV
RAGSFRPGELVLLAGFGGGMAASFALIEW
SEQ ID NO: 160

| | |
|---|---|
| 1 | cctgcaggcc gtcgagggcg cctggaagga ctacgcggag |
| | caggacggcc ggtcgctgga |
| 61 | ggagttcgcg gcgttcgtct accaccagcc gttcacgaag |
| | atggcctaca aggcgcaccg |
| 121 | ccacctgctg aacttcaacg gctacgacac cgacaaggac |
| | gccatcgagg gcgccctcgg |
| 181 | ccagacgacg gcgtacaaca acgtcatcgg caacagctac |
| | accgcgtcgg tgtacctggg |
| 241 | cctggccgcc ctgctcgacc aggcggacga cctgacgggc |
| | cgttccatcg gcttcctgag |
| 301 | ctacggctcg ggcagcgtcg ccgagttctt ctcgggcacc |
| | gtcgtcgccg ggtaccgcga |
| 361 | gcgtctgcgc accgaggcga accaggaggc gatcgcccgg |
| | cgcaagagcg tcgactacgc |
| 421 | cacctaccgc gagctgcacg agtacacgct cccgtccgac |
| | ggcggcgacc acgccacccc |
| 481 | ggtgcagacc accggcccct tccggctggc cgggatcaac |
| | gaccacaagc gcatctacga |
| 541 | ggcgcgctag cgacacccct cggcaacggg gtgcgccact |
| | gttcggcgca ccccgtgccg |
| 601 | ggctttcgca cagctattca cgaccatttg aggggcgggc |
| | agccgcatga ccgacgtccg |
| 661 | attccgcatt atcggtacgg gtgcctacgt accggaacgg |
| | atcgtctcca acgatgaagt |
| 721 | cggcgcgccg gccggggtgg acgacgactg gatcacccgc |
| | aagaccggta tccggcagcg |
| 781 | tcgctgggcc gccgacgacc aggccacctc ggacctggcc |
| | acggccgcgg ggcgggcagc |
| 841 | gctgaaagcg gcgggcatca cgcccgagca gctgaccgtg |
| | atcgcggtcg ccacctccac |
| 901 | gccggaccgg ccgcagccgc ccacggcggc ctatgtccag |
| | caccacctcg gtgcgaccgg |
| 961 | cactgcggcg ttcgacgtca acgcggtctg ctccggcacc |
| | gtgttcgcgc tgtcctcggt |
| 1021 | ggcgggcacc ctcgtgtacc ggggcggtta cgcgctggtc |
| | atcggcgcgg acctgtactc |
| 1081 | gcgcatcctc aacccggccg accgcaagac ggtcgtgctg |
| | ttcggggacg gcgccggcgc |
| 1141 | aatggtcctc gggccgacct cgaccggcac gggccccatc |
| | gtccggcgcg tcgccctgca |
| 1201 | caccttcggc ggcctcaccg acctgatccg tgtgcccgcg |
| | ggcggcagcc gccagccgct |
| 1261 | ggacacggat ggcctcgacg cgggactgca gtacttcgcg |
| | atggacgggc gtgaggtgcg |
| 1321 | ccgcttcgtc acggagcacc tgccgcagct gatcaagggc |
| | ttcctgcacg aggccggggt |
| 1381 | cgacgccgcc gacatcagcc acttcgtgcc gcatcaggcc |
| | aacggtgtca tgctcgacga |
| 1441 | ggtcttcggc gagctgcatc tgccgcgggc gaccatgcac |
| | cggacggtcg agacctacgg |
| 1501 | caacacggga gcggcctcca tcccgatcac catggacgcg |
| | gccgtgcgcg ccggttcctt |
| 1561 | ccggccgggc gagctggtcc tgctggccgg gttcggcggc |
| | ggcatggccg cgagcttcgc |
| 1621 | cctgatcgag tggtagtcgc ccgtaccacc acagcggtcc |
| | ggcgccacct gttccctgcg |
| 1681 | ccgggccgcc ctcggggcct ttaggcccca caccgcccca |
| | gccgacggat tcagtcgcgg |
| 1741 | cagtacctca gatgtccgct gcgacggcgt cccggagagc |
| | ccgggcgaga tcgcgggccc |
| 1801 | ccttctgctc gtccccggcc cctcccgcga gcaccacccg |
| | cggcggacgg ccgccgtcct |
| 1861 | ccgcgatacg ccgggcgagg tcgcaggcga gcacgccgga |
| | cccggagaag ccccccagca |
| 1921 | ccagcgaccg gccgactccg tgcgcggcca gggcaggctg |
| | cgcgccgtcg acgtcggtga |
| 1981 | gcagcaccag gagctcctgc ggcccggcgt agaggtcggc |
| | cagccggtcg tagcaggtcg |
| 2041 | cgggcgcgcc cggcggcggg atcagacaga tcgtgcccgc |
| | ccgctcgtgc ctcgccgccc |
| 2101 | gcagcgtgac cagcggaatg tcccgcccag ctccgga |

[0331] The immediate next step in the pathway involves the reduction of acetoacetyl-CoA to 3-HB-CoA. There are two primary routes characterized to convert acetoacetyl-CoA to (S)3-HB-CoA. The first is catalysed by an NADH-dependent (S)-3HB-CoA dehydrogenase, which has been well characterized in C. beijerinckii. (Tseng, et al., AEM, 75, 10, 2009). The second is an NADPH-dependent (R)-3HB-CoA dehydrogenase followed by a non-specific epimerase reaction in E. coli to convert (R) to (S)-3HB-CoA. The NADH-dependent dehydrogenase is the more desirable activity to pursue due to higher reported specific activities, direct conversion to (S)-3HB-CoA, and more thermodynamically favourable reaction.

[0332] The crotonase reaction (3HB-CoA->crotonyl-CoA) is immediately followed by a reduction to form butyryl-CoA, which is the substrate for the ELO1 elongase. The trans-2-enoyl-CoA reductase, ter, from T. denticola has been characeterized as an NADH-dependent reductase specific for the conversion of crotonyhCoA to butyryl-CoA without flavoproteins (Tucci, et al. PEBS Letters, 581, 2007). Ter has been cloned and expressed in E. coli and in vitro enzyme characterization have suggested irreversible activity in the desired direction of butyryl-CoA production (Shen, et al., AEM, 77, 9, 2011). Ccr from S. collinus, which has been reported to catalyze the same flavoprotein-independent reaction, has also been expressed in E. coli. However, ccr requires NADPH as a cofactor.

### VII. COMPOSITIONS OF MATTER

[0333] In various embodiments, a method is provided for producing a C4-C18 fatty acid, the method comprising combining a carbon source and a microorganism cell culture to produce the C4-C18 fatty acid. For example, the method includes combing a caron source and a microorganism cell culture, where the cell culture comprises an inhibitor of fatty acid synthase and/or the microorganism of said cell culture is genetically modified for reduced enzymatic activity in at least one of an organism's native fatty acid synthase pathway enzymes, providing for reduced conversion of malonyl-CoA to fatty acyl-ACPs; and the microorganism of said cell culture additionally has one or more genetic modifications conferring fatty acid production. In various embodiments, the C4-C18 fatty acid is selected from the group consisting of C4, C6, C8, C10, C12, C14, C16 and C18 fatty acids. Preferably, the fatty acid production occurs through the synthesis of fatty acyl-coAs of chain length 4-18. Alternatively, the fatty acid production occurs through the synthesis of fatty acyl-coAs via the expression of at least one elongase enzyme.

[0334] The fatty acids produced according to the method exist as a mixture. In various embodiments, the mixture is processed to remove cellular debris. However, residual components may be present in the mixture. For example, the mixture may further contain E. coli DNA. Preferably, the mixture consists essentially of C4-C18 compounds. For example, preferably the mixture is essentially free of one or more additional components selected from the group consisting of opacifying agents, pearlescent aids, astringents anti-acne agents, anti-caking agents, antimicrobial agents, antioxidants, biocides, pH modifiers, skin treating agents, vitamins, and humectants. In various embodiments, the mixture is essentially free of one or more essential oils selected from the group consisting of almond, anise, basil, bay, bergamot, bitter almond, camphor, cassia, cedarwood, chamomile, cinnamon, citronella, clove, clove bud, coriander, cypress, eucalyptus, fennel, fir, frankincense, geranium, ginger, grapefruit, jasmine, lavender, lemon, lemongrass, lime, litsea, marigold, marjoram, myrtle, neroli, nutmeg, oakmoss, orange, palmorosa, patchouli, pennyroyal, peppermint, pine, rose, rosemary, sage, sandalwood, spearmint, spruce, sweet birch, tangerine, tea tree, vanilla, vetivert, white thyme, and wintergreen.

[0335] In various embodiments, the mixture is isolated from fermentation media, and processed as a component in a consumer product. For example, the consumer product is selected from the group consisting of a detergent, soap, resin, emulsifier, lubricant, grease, and wax. The mixture may be incorporated into the consumer product as the same chemical entity as produced by the genetically modified organism, or the mixture may be further processed as a mixture of fatty acids, fatty alcohols, fatty acid esters, fatty aldehydes, fatty amines, fatty amides, or fatty acid salts.

### VIII. SEPARATION AND PURIFICATION FROM FERMENTATION

[0336] A selected chemical product may be separated and purified by the approaches described in the following paragraphs, taking into account that many methods of separation and purification are known in the art and the following disclosure is not meant to be limiting. Osmotic shock, sonication, homogenization, and/or a repeated freeze-thaw cycle followed by filtration and/or centrifugation, among other methods, such as pH adjustment and heat treatment, may be used to produce a cell-free extract from intact cells. Any one or more of these methods also may be employed to release the selected chemical producxt from cells as an extraction step. Further as to general processing of a bio-production broth comprising a selected chemical product, various methods may be practiced to remove biomass and/or separate the chemical product from the culture broth and its components, including centrifugation, filtration, extraction, chemical conversion such as esterification, distillation, crystallization, chromatography, and ion-exchange, in various forms. Additionally, cell rupture may be conducted as needed to release a selected chemical from the cell mass, such as by sonication, homogenization, pH adjustment or heating. a selected chemical may be further separated and/or purified by methods known in the art, including any combination of one or more of centrifugation, liquid-liquid separations, including extractions such as solvent extraction, reactive extraction, two-phase aqueous extraction and two-phase solvent extraction, membrane separation technologies, distillation, evaporation, ion-exchange chromatography, adsorption chromatography, reverse phase chromatography and crystallization. Any of the above methods may be applied to a portion of a bio-production broth (i.e., a fermentation broth, whether made under aerobic, anaerobic, or microaerobic conditions), such as may be removed from a bio-production event gradually or periodically, or to the broth at termination of a bio-production event.

[0337] Polypeptides, such as encoded by the various specified genes, may be NADH- or NADPH-dependent, and methods known in the art may be used to convert a particular enzyme to be either form. More particularly, as noted in WO 2002/042418, “any method can be used to convert a polypeptide that uses NADPH as a cofactor into a polypeptide that uses NADH as a cofactor such as those described by others (Eppink et al., J. Mol. Biol., 292 (1): 87-96 (1999), Hall and Tomsett, Microbiology, 146 (Pt 6): 1399-406 (2000), and Dohr et al., Proc. Natl. Acad. Sci., 98 (1): 81-86 (2001)).”

[0338] In various embodiments, bio-production of a selected chemical product may reach at least 1, at least 2, at least 5, at least 10, at least 20, at least 30, at least 40, and at least 50 g/liter titer, such as by using one of the methods disclosed herein.

[0339] As may be realized by appreciation of the advances disclosed herein as they relate to commercial fermentations of selected chemical products, embodiments of the present invention may be combined with other genetic modifications and/or method or system modulations so as to obtain a microorganism (and corresponding method) effective to produce at least 10, at least 20, at least 30, at least 40, at least 45, at least 50, at least 80, at least 100, or at least 120 grams of a chemical product per liter of final (e.g., spent) fermentation broth while achieving this with specific and/or volumetric productivity rates as disclosed herein.

[0340] In some embodiments a microbial chemical bio-production event (i.e., a fermentation event using a cultured population of a microorganism) proceeds using a genetically modified microorganism as described herein, wherein the specific productivity is between 0.01 and 0.60 grams of selected chemical product produced per gram of microorganism cell on a dry weight basis per hour (g chemical product/g DCW-hr). In various embodiments the specific productivity is greater than 0.01, greater than 0.05, greater than 0.10, greater than 0.15, greater than 0.20, greater than 0.25, greater than 0.30, greater than 0.35, greater than 0.40, greater than 0.45, or greater than 0.50 g chemical product/g DCW-hr. Specific productivity may be assessed over a 2, 4, 6, 8, 12 or 24 hour period in a particular microbial chemical production event. More particularly, the specific productivity for a chemical product is between 0.05 and 0.10, 0.10 and 0.15, 0.15 and 0.20, 0.20 and 0.25, 0.25 and 0.30, 0.30 and 0.35, 0.35 and 0.40, 0.40 and 0.45, or 0.45 and 0.50 g chemical product/g DCW-hr., 0.50 and 0.55, or 0.55 and 0.60 g chemical product/g DCW-hr. Various embodiments comprise culture systems demonstrating such productivity.

[0341] In some embodiments, specific productivity as measured over a 24-hour fermentation (culture) period may be greater than 0.01, 0.05, 0.10, 0.20, 0.5, 1.0, 2.0, 3.0, 4.0, 5.0, 6.0, 7.0, 8.0, 9.0, 10.0, 11.0 or 12.0 grams of chemical product per gram DCW of microorganisms (based on the final DCW at the end of the 24-hour period).

[0342] In various aspects and embodiments of the present invention, there is a resulting substantial increase in microorganism specific productivity that advances the fermentation art and commercial economic feasibility of microbial chemical production, such as of phloroglucinol or resorcinol.

[0343] Stated in another manner, in various embodiments the specific productivity exceeds (is at least) 0.01 g chemical product/g DCW-hr, exceeds (is at least) 0.05 g chemical product/g DCW-hr, exceeds (is at least) 0.10 g chemical product/g DCW-hr, exceeds (is at least) 0.15 g chemical product/g DCW-hr, exceeds (is at least) 0.20 g chemical product/g DCW-hr, exceeds (is at least) 0.25 g chemical product/g DCW-hr, exceeds (is at least) 0.30 g chemical product/g DCW-hr, exceeds (is at least) 0.35 g chemical product/g DCW-hr, exceeds (is at least) 0.40 g chemical product/g DCW-hr, exceeds (is at least) 0.45 g chemical product/g DCW-hr, exceeds (is at least) 0.50 g chemical product/g DCW-hr, exceeds (is at least) 0.60 g chemical product/g DCW-hr.

[0344] More generally, based on various combinations of the genetic modifications described herein, optionally in combination with supplementations described herein, specific productivity values for 3-HP, and for other chemical products described herein, may exceed 0.01 g chemical product/g DCW-hr, may exceed 0.05 g chemical product/g DCW-hr, may exceed 0.10 g chemical product/g DCW-hr, may exceed 0.15 g chemical product/g DCW-hr, may exceed 0.20 g chemical product/g DCW-hr, may exceed 0.25 g chemical product/g DCW-hr, may exceed 0.30 g chemical product/g DCW-hr, may exceed 0.35 g chemical product/g DCW-hr, may exceed 0.40 g chemical product/g DCW-hr, may exceed 0.45 g chemical product/g DCW-hr, and may exceed 0.50 g or 0.60 chemical product/g DCW-hr. Such specific productivity may be assessed over a 2, 4, 6, 8, 12 or 24 hour period in a particular microbial chemical production event.

[0345] In some embodiments a microbial chemical biosynthesis event (i.e., a fermentation event using a cultured population of a microorganism) proceeds using a genetically modified microorganism as described herein, wherein the specific productivity is between 0.01 and 0.60 grams of selected chemical product produced per gram of microorganism cell on a dry weight basis per hour (g chemical product/g DCW-hr). In various embodiments the specific productivity is greater than 0.01, greater than 0.05, greater than 0.10, greater than 0.15, greater than 0.20, greater than 0.25, greater than 0.30, greater than 0.35, greater than 0.40, greater than 0.45, or greater than 0.50 g chemical product/g DCW-hr. Specific productivity may be assessed over a 2, 4, 6, 8, 12 or 24 hour period in a particular microbial chemical production event. More particularly, the specific productivity for a chemical product is between 0.05 and 0.10, 0.10 and 0.15, 0.15 and 0.20, 0.20 and 0.25, 0.25 and 0.30, 0.30 and 0.35, 0.35 and 0.40, 0.40 and 0.45, or 0.45 and 0.50 g chemical product/g DCW-hr., 0.50 and 0.55, or 0.55 and 0.60 g chemical product/g DCW-hr. Various embodiments comprise culture systems demonstrating such productivity.

[0346] Also, in various embodiments of the present invention the volumetric productivity achieved may be 0.25 g polyketide (or other chemical product) per liter per hour (g (chemical product) IL-hr), may be greater than 0.25 g polyketide (or other chemical product)/L-hr, may be greater than 0.50 g polyketide (or other chemical product)/L-hr, may be greater than 1.0 g polyketide (or other chemical product) IL-hr, may be greater than 1.50 g polyketide (or other chemical product) IL-hr, may be greater than 2.0 g polyketide (or other chemical product) IL-hr, may be greater than 2.50 g polyketide (or other chemical product) IL-hr, may be greater than 3.0 g polyketide (or other chemical product) IL-hr, may be greater than 3.50 g polyketide (or other chemical product) IL-hr, may be greater than 4.0 g polyketide (or other chemical product) IL-hr, may be greater than 4.50 g polyketide (or other chemical product)/L-hr, may be greater than 5.0 g polyketide (or other chemical product)/L-hr, may be greater than 5.50 g polyketide (or other chemical product) IL-hr, may be greater than 6.0 g polyketide (or other chemical product) IL-hr, may be greater than 6.50 g polyketide (or other chemical product)/L-hr, may be greater than 7.0 g polyketide (or other chemical product) IL-hr, may be greater than 7.50 g polyketide (or other chemical product)/L-hr, may be greater than 8.0 g polyketide (or other chemical product) IL-hr, may be greater than 8.50 g polyketide (or other chemical product) IL-hr, may be greater than 9.0 g polyketide (or other chemical product) IL-hr, may be greater than 9.50 g polyketide (or other chemical product) IL-hr, or may be greater than 10.0 g polyketide (or other chemical product) IL-hr.

[0347] In some embodiments, specific productivity as measured over a 24-hour fermentation (culture) period may be greater than 0.01, 0.05, 0.10, 0.20, 0.5, 1.0, 2.0, 3.0, 4.0, 5.0, 6.0, 7.0, 8.0, 9.0, 10.0, 11.0 or 12.0 grams of chemical product per gram DCW of microorganisms (based on the final DCW at the end of the 24-hour period).

[0348] The improvements achieved by embodiments of the present invention may be determined by percentage increase in specific productivity, or by percentage increase in volumetric productivity, compared with an appropriate control microorganism lacking the particular genetic modification combinations taught herein (with or without the supplements taught herein, added to a vessel comprising the microorganism population). For particular embodiments and groups thereof, such specific productivity and/or volumetric productivity improvements is/are at least 10, at least 20, at least 30, at least 40, at least 50, at least 100, at least 200, at least 300, at least 400, and at least 500 percent over the respective specific productivity and/or volumetric productivity of such appropriate control microorganism.

[0349] The specific methods and teachings of the specification, and/or cited references that are incorporated by reference, may be incorporated into the examples. Also, production of a chemical product may reach at least 1, at least 2, at least 5, at least 10, at least 20, at least 30, at least 40, and at least 50 g/liter titer in various embodiments.

[0350] The metrics may be applicable to any of the compositions, e.g., genetically modified microorganisms, methods, e.g., of producing chemical products, and systems, e.g., fermentation systems utilizing the genetically modified microorganisms and/or methods disclosed herein.

[0351] The amount of 3-HP or other product(s), including a polyketide, produced in a bio-production media generally can be determined using a number of methods known in the art, for example, high performance liquid chromatography (HPLC), gas chromatography (GC), GC/Mass Spectroscopy (MS), or spectrometry.

[0352] When 3-HP is the chemical product, the 3-HP may be separated and purified by the approaches described in the following paragraphs, taking into account that many methods of separation and purification are known in the art and the following disclosure is not meant to be limiting. Osmotic shock, sonication, homogenization, and/or a repeated freeze-thaw cycle followed by filtration and/or centrifugation, among other methods, such as pH adjustment and heat treatment, may be used to produce a cell-free extract from intact cells. Any one or more of these methods also may be employed to release 3-HP from cells as an extraction step.

[0353] Further as to general processing of a bio-production broth comprising 3-HP, various methods may be practiced to remove biomass and/or separate 3-HP from the culture broth and its components. Methods to separate and/or concentrate the 3-HP include centrifugation, filtration, extraction, chemical conversion such as esterification, distillation (which may result in chemical conversion, such as dehydration to acrylic acid, under some reactive-distillation conditions), crystallization, chromatography, and ion-exchange, in various forms. Additionally, cell rupture may be conducted as needed to release 3-HP from the cell mass, such as by sonication, homogenization, pH adjustment or heating. 3-HP may be further separated and/or purified by methods known in the art, including any combination of one or more of centrifugation, liquid-liquid separations, including extractions such as solvent extraction, reactive extraction, two-phase aqueous extraction and two-phase solvent extraction, membrane separation technologies, distillation, evaporation, ion-exchange chromatography, adsorption chromatography, reverse phase chromatography and crystallization. Any of the above methods may be applied to a portion of a bio-production broth (i.e., a fermentation broth, whether made under aerobic, anaerobic, or microaerobic conditions), such as may be removed from a bio-production event gradually or periodically, or to the broth at termination of a bio-production event. Conversion of 3-HP to downstream products, such as described herein, may proceed after separation and purification, or, such as with distillation, thin-film evaporation, or wiped-film evaporation optionally also in part as a separation means.

[0354] For various of these approaches, one may apply a counter-current strategy, or a sequential or iterative strategy, such as multi-pass extractions. For example, a given aqueous solution comprising 3-HP may be repeatedly extracted with a non-polar phase comprising an amine to achieve multiple reactive extractions.

[0355] When a culture event (fermentation event) is at a point of completion, the spent broth may transferred to a separate tank, or remain in the culture vessel, and in either case the temperature may be elevated to at least 60° C. for a minimum of one hour in order to kill the microorganisms. (Alternatively, as noted above other approaches to killing the microorganisms may be practiced, or centrifugation may occur prior to heating.) By spent broth is meant the final liquid volume comprising the initial nutrient media, cells grown from the microorganism inoculum (and possibly including some original cells of the inoculum), 3-HP, and optionally liquid additions made after providing the initial nutrient media, such as periodic additions to provide additional carbon source, etc. It is noted that the spent broth may comprise organic acids other than 3-HP, such as for example acetic acid and/or lactic acid.

[0356] A centrifugation step may then be practiced to filter out the biomass solids (e.g., microorganism cells). This may be achieved in a continuous or batch centrifuge, and solids removal may be at least about 80%, 85%, 90%, or 95% in a single pass, or cumulatively after two or more serial centrifugations.

[0357] An optional step is to polish the centrifuged liquid through a filter, such as microfiltration or ultrafiltration, or may comprise a filter press or other filter device to which is added a filter aid such as diatomaceous earth. Alternative or supplemental approaches to this and the centrifugation may include removal of cells by a flocculent, where the cells floc and are allowed to settle, and the liquid is drawn off or otherwise removed. A flocculent may be added to a fermentation broth after which settling of material is allowed for a time, and then separations may be applied, including but not limited to centrifugation.

[0358] After such steps, a spent broth comprising 3-HP and substantially free of solids is obtained for further processing. By “substantially free of solids” is meant that greater than 98%, 99%, or 99.5% of the solids have been removed.

[0359] In various embodiments this spent broth comprises various ions of salts, such as Na, Cl, SO4, and PO4. In some embodiments these ions may be removed by passing this spent broth through ion exchange columns, or otherwise contacting the spent broth with appropriate ion exchange material. Here and elsewhere in this document, “contacting” is taken to mean a contacting for the stated purpose by any way known to persons skilled in the art, such as, for example, in a column, under appropriate conditions that are well within the ability of persons of ordinary skill in the relevant art to determine. As but one example, these may comprise sequential contacting with anion and cation exchange materials (in any order), or with a mixed anion/cation material. This demineralization step should remove most such inorganic ions without removing the 3-HP. This may be achieved, for example, by lowering the pH sufficiently to protonate 3-HP and similar organic acids so that these acids are not bound to the anion exchange material, whereas anions, such as Cl and SO4, that remain charged at such pH are removed from the solution by binding to the resin. Likewise, positively charged ions are removed by contacting with cation exchange material. Such removal of ions may be assessed by a decrease in conductivity of the solution. Such ion exchange materials may be regenerated by methods known to those skilled in the art.

[0360] In some embodiments, the spent broth (such as but not necessarily after the previous demineralization step) is subjected to a pH elevation, after which it is passed through an ion exchange column, or otherwise contacted with an ion exchange resin, that comprises anionic groups, such as amines, to which organic acids, ionic at this pH, associate. Other organics that do not so associate with amines at this pH (which may be over 6.5, over 7.5, over 8.5, over 9.5, over 10.5, or higher pH) may be separated from the organic acids at this stage, such as by flushing with an elevated pH rinse. Thereafter elution with a lower pH and/or elevated salt content rinse may remove the organic acids. Eluting with a gradient of decreasing pH and/or increasing salt content rinses may allow more distinct separation of 3-HP from other organic acids, thereafter simplifying further processing.

[0361] This latter step of anion-exchange resin retention of organic acids may be practiced before or after the demineralization step. However, the following two approaches are alternatives to the anion-exchange resin step.

[0362] A first alternative approach comprises reactive extraction (a form of liquid-liquid extraction) as exemplified in this and the following paragraphs. The spent broth, which may be at a stage before or after the demineralization step above, is combined with a quantity of a tertiary amine such as Alamine-336® (Cognis Corp., Cincinnati, Ohio USA) at low pH. Co-solvents for the Alamine-336 or other tertiary amine may be added and include, but are not limited to benzene, carbon tetrachloride, chloroform, cyclohexane, disobutyl ketone, ethanol, #2 fuel oil, isopropanol, kerosene, n-butanol, isobutanol, octanol, and n-decanol that increase the partition coefficient when combined with the amine. After appropriate mixing a period of time for phase separation transpires, after which the non-polar phase, which comprises 3-HP associated with the Alamine-336 or other tertiary amine, is separated from the aqueous phase.

[0363] When a co-solvent is used that has a lower boiling point than the 3-HP/tertiary amine, a distilling step may be used to remove the co-solvent, thereby leaving the 3-HP-tertiary amine complex in the non-polar phase.

[0364] Whether or not there is such a distillation step, a stripping or recovery step may be used to separate the 3-HP from the tertiary amine. An inorganic salt, such as ammonium sulfate, sodium chloride, or sodium carbonate, or a base such as sodium hydroxide or ammonium hydroxide, is added to the 3-HP/tertiary amine to reverse the amine protonation reaction, and a second phase is provided by addition of an aqueous solution (which may be the vehicle for provision of the inorganic salt). After suitable mixing, two phases result and this allows for tertiary amine regeneration and re-use, and provides the 3-HP in an aqueous solution. Alternatively, hot water may also be used without a salt or base to recover the 3HP from the amine.

[0365] In the above approach the phase separation and extraction of 3-HP to the aqueous phase can serve to concentrate the 3-HP. It is noted that chromatographic separation of respective organic acids also can serve to concentrate such acids, such as 3-HP. In similar approaches other suitable, non-polar amines, which may include primary, secondary and quaternary amines, may be used instead of and/or in combination with a tertiary amine.

[0366] A second alternative approach is crystallization. For example, the spent broth (such as free of biomass solids) may be contacted with a strong base such as ammonium hydroxide, which results in formation of an ammonium salt of 3-HP. This may be concentrated, and then ammonium-3-HP crystals are formed and may be separated, such as by filtration, from the aqueous phase. Once collected, ammonium-3-HP crystals may be treated with an acid, such as sulfuric acid, so that ammonium sulfate is regenerated, so that 3-HP and ammonium sulfate result.

[0367] Also, various aqueous two-phase extraction methods may be utilized to separate and/or concentrate a desired chemical product from a fermentation broth or later-obtained solution. It is known that the addition of polymers, such as dextran and glycol polymers, such as polyethylene glycol (PEG) and polypropylene glycol (PPG) to an aqueous solution may result in formation of two aqueous phases. In such systems a desired chemical product may segregate to one phase while cells and other chemicals partition to the other phase, thus providing for a separation without use of organic solvents. This approach has been demonstrated for some chemical products, but challenges associated with chemical product recovery from a polymer solution and low selectivities are recognized (See “Extractive Recovery of Products from Fermentation Broths,” Joong Kyun Kim et al., Biotechnol. Bioprocess Eng., 1999(4)1-11, incorporated by reference for all of its teachings of extractive recovery methods).

[0368] Various substitutions and combinations of the above steps and processes may be made to obtain a relatively purified 3-HP solution. Also, methods of separation and purification disclosed in U.S. Pat. No. 6,534,679, issued Mar. 18, 2003, and incorporated by reference herein for such methods disclosures, may be considered based on a particular processing scheme. Also, in some culture events periodic removal of a portion of the liquid volume may be made, and processing of such portion(s) may be made to recover the 3-HP, including by any combination of the approaches disclosed above.

[0369] As noted, solvent extraction is another alternative. This may use any of a number of and/or combinations of solvents, including alcohols, esters, ketones, and various organic solvents. Without being limiting, after phase separation a distillation step or a secondary extraction may be employed to separate 3-HP from the organic phase.

[0370] The following published resources are incorporated by reference herein for their respective teachings to indicate the level of skill in these relevant arts, and as needed to support a disclosure that teaches how to make and use methods of industrial bio-production of 3-HP, and also industrial systems that may be used to achieve such conversion with any of the recombinant microorganisms of the present invention (Biochemical Engineering Fundamentals, 2′ d Ed. J. E. Bailey and D. F. 011 is, McGraw Hill, New York, 1986, entire book for purposes indicated and Chapter 9, pp. 533-657 in particular for biological reactor design; Unit Operations of Chemical Engineering, 5th E a W. L. McCabe et al., McGraw Hill, New York 1993, entire book for purposes indicated, and particularly for process and separation technologies analyses; Equilibrium Staged Separations, P. C. Wankat, Prentice Hall, Englewood Cliffs, N.J. USA, 1988, entire book for separation technologies teachings).

### IX. CONVERSION OF FERMENTATION PRODUCT TO DOWNSTREAM PRODUCT(S)

[0371] Conversion of 3-HP to Acrylic Acid and Downstream Products

[0372] As discussed herein, various embodiments described herein are related to production of a particular chemical product, 3-hydroxypropionic acid (3-HP). This organic acid, 3-HP, may be converted to various other products having industrial uses, such as but not limited to acrylic acid, esters of acrylic acid, and other chemicals obtained from 3-HP, referred to as “downstream products.” Under some approaches the 3-HP may be converted to acrylic acid, acrylamide, and/or other downstream chemical products, in some instances the conversion being associated with the separation and/or purification steps. Many conversions to such downstream products are described herein. The methods of the invention include steps to produce downstream products of 3-HP.

[0373] As a C3 building block, 3-HP offers much potential in a variety of chemical conversions to commercially important intermediates, industrial end products, and consumer products. For example, 3-HP may be converted to acrylic acid, acrylates (e.g., acrylic acid salts and esters), 1,3-propanediol, malonic acid, ethyl-3-hydroxypropionate, ethyl ethoxy propionate, propiolactone, acrylamide, or acrylonitrile.

[0374] For example, methyl acrylate may be made from 3-HP via dehydration and esterification, the latter to add a methyl group (such as using methanol); acrylamide may be made from 3-HP via dehydration and amidation reactions; acrylonitrile may be made via a dehydration reaction and forming a nitrile moiety; propriolactone may be made from 3-HP via a ring-forming internal esterification reaction (eliminating a water molecule); ethyl-3-HP may be made from 3-HP via esterification with ethanol; malonic acid may be made from 3-HP via an oxidation reaction; and 1,3-propanediol may be made from 3-HP via a reduction reaction. Also, acrylic acid, first converted from 3-HP by dehydration, may be esterified with appropriate compounds to form a number of commercially important acrylate-based esters, including but not limited to methyl acrylate, ethyl acrylate, methyl acrylate, 2-ethylhexyl acrylate, butyl acrylate, and lauryl acrylate. Alternatively, 3HP may be esterified to form an ester of 3HP and then dehydrated to form the acrylate ester.

[0375] Additionally, 3-HP may be oligomerized or polymerized to form poly(3-hydroxypropionate) homopolymers, or co-polymerized with one or more other monomers to form various co-polymers. Because 3-HP has only a single stereoisomer, polymerization of 3-HP is not complicated by the stereo-specificity of monomers during chain growth. This is in contrast to (S)-2-Hydroxypropanoic acid (also known as lactic acid), which has two (D, L) stereoisomers that must be considered during its polymerizations.

[0376] As will be further described, 3-HP can be converted into derivatives starting (i) substantially as the protonated form of 3-hydroxypropionic acid; (ii) substantially as the deprotonated form, 3-hydroxypropionate; or (iii) as mixtures of the protonated and deprotonated forms. Generally, the fraction of 3-HP present as the acid versus the salt will depend on the pH, the presence of other ionic species in solution, temperature (which changes the equilibrium constant relating the acid and salt forms), and to some extent pressure. Many chemical conversions may be carried out from either of the 3-HP forms, and overall process economics will typically dictate the form of 3-HP for downstream conversion.

[0377] Also, as an example of a conversion during separation, 3-HP in an amine salt form, such as in the extraction step herein disclosed using Alamine 336 as the amine, may be converted to acrylic acid by contacting a solution comprising the 3-HP amine salt with a dehydration catalyst, such as aluminum oxide, at an elevated temperature, such as 170 to 180 C, or 180 to 190 C, or 190 to 200 C, and passing the collected vapor phase over a low temperature condenser. Operating conditions, including 3-HP concentration, organic amine, co-solvent (if any), temperature, flow rates, dehydration catalyst, and condenser temperature, are evaluated and improved for commercial purposes. Conversion of 3-HP to acrylic acid is expected to exceed at least 80 percent, or at least 90 percent, in a single conversion event. The amine may be re-used, optionally after clean [symbol] up. Other dehydration catalysts, as provided herein, may be evaluated. It is noted that U.S. Pat. No. 7,186,856 discloses data regarding this conversion approach, albeit as part of an extractive salt-splitting conversion that differs from the teachings herein. However, U.S. Pat. No. 7,186,856 is incorporated by reference for its methods, including extractive salt-splitting, the latter to further indicate the various ways 3-HP may be extracted from a microbial fermentation broth.

[0378] Further as to embodiments in which the chemical product being synthesized by the microorganism host cell is 3-HP, made as provided herein and optionally purified to a selected purity prior to conversion, the methods of the present invention can also be used to produce “downstream” compounds derived from 3-HP, such as polymerized-3-HP (poly-3-HP), acrylic acid, polyacrylic acid (polymerized acrylic acid, in various forms), methyl acrylate, acrylamide, acrylonitrile, propiolactone, ethyl 3-HP, malonic acid, and 1,3-propanediol. Numerous approaches may be employed for such downstream conversions, generally falling into enzymatic, catalytic (chemical conversion process using a catalyst), thermal, and combinations thereof (including some wherein a desired pressure is applied to accelerate a reaction).

[0379] As noted, an important industrial chemical product that may be produced from 3-HP is acrylic acid. Chemically, one of the carbon-carbon single bonds in 3-HP must undergo a dehydration reaction, converting to a carbon-carbon double bond and rejecting a water molecule. Dehydration of 3-HP in principle can be carried out in the liquid phase or in the gas phase. In some embodiments, the dehydration takes place in the presence of a suitable homogeneous or heterogeneous catalyst. Suitable dehydration catalysts are both acid and alkaline catalysts. Following dehydration, an acrylic acid-containing phase is obtained and can be purified where appropriate by further purification steps, such as by distillation methods, extraction methods, or crystallization methods, or combinations thereof.

[0380] Making acrylic acid from 3-HP via a dehydration reaction may be achieved by a number of commercial methodologies including via a distillation process, which may be part of the separation regime and which may include an acid and/or a metal ion as catalyst. More broadly, incorporated herein for its teachings of conversion of 3-HP, and other β-hydroxy carbonyl compounds, to acrylic acid and other related downstream compounds, is U.S. Patent Publication No. 2007/0219390 A1, published Sep. 20, 2007, now abandoned. This publication lists numerous catalysts and provides examples of conversions, which are specifically incorporated herein. Also among the various specific methods to dehydrate 3-HP to produce acrylic acid is an older method, described in U.S. Pat. No. 2,469,701 (Redmon). This reference teaches a method for the preparation of acrylic acid by heating 3-HP to a temperature between 130 and 190° C., in the presence of a dehydration catalyst, such as sulfuric acid or phosphoric acid, under reduced pressure. U.S. Patent Publication No. 2005/0222458 A1 (Craciun et al.) also provides a process for the preparation of acrylic acid by heating 3-HP or its derivatives. Vapor-phase dehydration of 3-HP occurs in the presence of dehydration catalysts, such as packed beds of silica, alumina, or titania. These patent publications are incorporated by reference for their methods relating to converting 3-HP to acrylic acid.

[0381] The dehydration catalyst may comprise one or more metal oxides, such as A1203, Si02, or Ti02. In some embodiments, the dehydration catalyst is a high surface area A1203 or a high surface area silica wherein the silica is substantially Si02. High surface area for the purposes of the invention means a surface area of at least about 50, 75, 100 m2/g, or more. In some embodiments, the dehydration catalyst may comprise an aluminosilicate, such as a zeolite.

[0382] For example, including as exemplified from such incorporated references, 3-HP may be dehydrated to acrylic acid via various specific methods, each often involving one or more dehydration catalysts. One catalyst of particular apparent value is titanium, such as in the form of titanium oxide, TiO(2). A titanium dioxide catalyst may be provided in a dehydration system that distills an aqueous solution comprising 3-HP, wherein the 3-HP dehydrates, such as upon volatilization, converting to acrylic acid, and the acrylic acid is collected by condensation from the vapor phase.

[0383] As but one specific method, an aqueous solution of 3-HP is passed through a reactor column packed with a titanium oxide catalyst maintained at a temperature between 170 and 190 C and at ambient atmospheric pressure. Vapors leaving the reactor column are passed over a low temperature condenser, where acrylic acid is collected. The low temperature condenser may be cooled to 30 C or less, 2 C or less, or at any suitable temperature for efficient condensation based on the flow rate and design of the system. Also, the reactor column temperatures may be lower, for instance when operating at a pressure lower than ambient atmospheric pressure. It is noted that Example 1 of U.S. Patent Publication No. 2007/0219390, published Sep. 20, 2007, now abandoned, provides specific parameters that employs the approach of this method. As noted, this publication is incorporated by reference for this teaching and also for its listing of catalysts that may be used in a 3-HP to acrylic acid dehydration reaction.

[0384] Further as to dehydration catalysts, the following table summarizes a number of catalysts (including chemical classes) that may be used in a dehydration reaction from 3-HP (or its esters) to acrylic acid (or acrylate esters). Such catalysts, some of which may be used in any of solid, liquid or gaseous forms, may be used individually or in any combination. This listing of catalysts is not intended to be limiting, and many specific catalysts not listed may be used for specific dehydration reactions. Further without being limiting, catalyst selection may depend on the solution pH and/or the form of 3-HP in a particular conversion, so that an acidic catalyst may be used when 3-HP is in acidic form, and a basic catalyst may be used when the ammonium salt of 3-HP is being converted to acrylic acid. Also, some catalysts may be in the form of ion exchange resins.

TABLE 12
Dehydration Catalysts

| Catalyst by Chemical Class | Non-limiting Examples |
|---|---|
| Acids | H2SO4, HCI, titanic acids, metal oxide |
| (including weak and strong) | hydrates, metal sulfates (MSO4,. where |
| | M = Zn, Sn, Ca, Ba, Ni, Co, or other |
| | transition metals), metal oxide sulfates, |
| | metal phosphates (e.g., M3, (PO4) 2, |
| | where M = Ca, Ba), metal phosphates, |
| | metal oxide phosphates, carbon (e.g., |
| | transition metals on a carbon support), |
| | mineral acids, carboxylic acids, salts |
| | thereof, acidic resins, acidic zeolites, |
| | clays, Si02/H3PO4, fluorinated A1203, |
| | Nb203/P05 3, N b203/SO4 2, |
| | Nb2O5H2O, phosphotungstic acids, |
| | phosphomolybdic acids, silicomolybdic |
| | acids, silicotungstic acids, carbon |
| | dioxide |
| Bases | NaOH, ammonia, polyvinylpyridine, |
| (including weak and strong) | metal hydroxides, Zr(OH)4, and |
| | substituted amines |
| Oxides (generally metal oxides) | TiO₂, Zr02, A1203, SiO2, Zn02, Sn02, |
| | W03, Mn02, Fe2O3, V205 |

[0385] As to another specific method using one of these catalysts, concentrated sulfuric acid and an aqueous solution comprising 3-HP are separately flowed into a reactor maintained at 150 to 165° C. at a reduced pressure of 100 mm Hg. Flowing from the reactor is a solution comprising acrylic acid. A specific embodiment of this method, disclosed in Example 1 of US2009/0076297, incorporated by reference herein, indicates a yield of acrylic acid exceeding 95 percent.

[0386] Based on the wide range of possible catalysts and knowledge in the art of dehydration reactions of this type, numerous other specific dehydration methods may be evaluated and implemented for commercial production.

[0387] The dehydration of 3-HP may also take place in the absence of a dehydration catalyst. For example, the reaction may be run in the vapor phase in the presence of a nominally inert packing such as glass, ceramic, a resin, porcelain, plastic, metallic or brick dust packing and still form acrylic acid in reasonable yields and purity. The catalyst particles can be sized and configured such that the chemistry is, in some embodiments, mass-transfer-limited or kinetically limited. The catalyst can take the form of powder, pellets, granules, beads, extrudates, and so on. When a catalyst support is optionally employed, the support may assume any physical form such as pellets, spheres, monolithic channels, etc. The supports may be co-precipitated with active metal species; or the support may be treated with the catalytic metal species and then used as is or formed into the aforementioned shapes; or the support may be formed into the aforementioned shapes and then treated with the catalytic species.

[0388] A reactor for dehydration of 3-HP may be engineered and operated in a wide variety of ways. The reactor operation can be continuous, semi-continuous, or batch. It is perceived that an operation that is substantially continuous and at steady state is advantageous from operations and economics perspectives. The flow pattern can be substantially plug flow, substantially well-mixed, or a flow pattern between these extremes. A “reactor” can actually be a series or network of several reactors in various arrangements.

[0389] For example, without being limiting, acrylic acid may be made from 3-HP via a dehydration reaction, which may be achieved by a number of commercial methodologies including via a distillation process, which may be part of the separation regime and which may include an acid and/or a metal ion as catalyst. More broadly, incorporated herein for its teachings of conversion of 3-HP, and other β-hydroxy carbonyl compounds, to acrylic acid and other related downstream compounds, is U.S. Patent Publication No. 2007/0219390 A1, published Sep. 20, 2007, now abandoned. This publication lists numerous catalysts and provides examples of conversions, which are specifically incorporated herein.

[0390] For example, including as exemplified from such incorporated references, 3-HP may be dehydrated to acrylic acid via various specific methods, each often involving one or more dehydration catalysts.

[0391] One catalyst of particular apparent value is titanium, such as in the form of titanium oxide, TiO2. A titanium dioxide catalyst may be provided in a dehydration system that distills an aqueous solution comprising 3-HP, wherein the 3-HP dehydrates, such as upon volatilization, converting to acrylic acid, and the acrylic acid is collected by condensation from the vapor phase.

[0392] As but one specific method, an aqueous solution of 3-HP is passed through a reactor column packed with a titanium oxide catalyst maintained at a temperature between 170 and 190° C. and at ambient atmospheric pressure. Vapors leaving the reactor column are passed over a low temperature condenser, where acrylic acid is collected. The low temperature condenser may be cooled to 30° C. or less, 20° C. or less, 2° C. or less, or at any suitable temperature for efficient condensation based on the flow rate and design of the system. Also, the reactor column temperatures may be lower, for instance when operating at a pressure lower than ambient atmospheric pressure. It is noted that Example 1 of U.S. Patent Publication No. 2007/0219390, published Sep. 20, 2007, now abandoned, provides specific parameters that employs the approach of this method. As noted, this publication is incorporated by reference for this teaching and also for its listing of catalysts that may be used in a 3-HP to acrylic acid dehydration reaction.

[0393] Crystallization of the acrylic acid obtained by dehydration of 3-HP may be used as one of the final separation/purification steps. Various approaches to crystallization are known in the art, including crystallization of esters.

[0394] As noted above, in some embodiments, a salt of 3-HP is converted to acrylic acid or an ester or salt thereof. For example, U.S. Pat. No. 7,186,856 (Meng et al.) teaches a process for producing acrylic acid from the ammonium salt of 3-HP, which involves a first step of heating the ammonium salt of 3-HP in the presence of an organic amine or solvent that is immiscible with water, to form a two-phase solution and split the 3-HP salt into its respective ionic constituents under conditions which transfer 3-HP from the aqueous phase to the organic phase of the solution, leaving ammonia and ammonium cations in the aqueous phase. The organic phase is then back-extracted to separate the 3-HP, followed by a second step of heating the 3-HP-containing solution in the presence of a dehydration catalyst to produce acrylic acid. U.S. Pat. No. 7,186,856 is incorporated by reference for its methods for producing acrylic acid from salts of 3-HP. Various alternatives to the particular approach disclosed in this patent may be developed for suitable extraction and conversion processes.

[0395] Methyl acrylate may be made from 3-HP via dehydration and esterification, the latter to add a methyl group (such as using methanol), acrylamide may be made from 3-HP via dehydration and amidation reactions, acrylonitrile may be made via a dehydration reaction and forming a nitrile moiety, propriolactone may be made from 3-HP via a ring-forming internal esterification reaction (eliminating a water molecule), ethyl-3 [symbol] HP may be made from 3-HP via esterification with ethanol, malonic acid may be made from 3-HP via an oxidation reaction, and 1,3-propanediol may be made from 3-HP via a reduction reaction.

[0396] Malonic acid may be produced from oxidation of 3-HP as produced herein. U.S. Pat. No. 5,817,870 (Haas et al.) discloses catalytic oxidation of 3-HP by a precious metal selected from Ru, Rh, Pd, Os, Ir or Pt. These can be pure metal catalysts or supported catalysts. The catalytic oxidation can be carried out using a suspension catalyst in a suspension reactor or using a fixed-bed catalyst in a fixed-bed reactor. If the catalyst, such as a supported catalyst, is disposed in a fixed-bed reactor, the latter can be operated in a trickle-bed procedure as well as also in a liquid-phase procedure. In the trickle-bed procedure the aqueous phase comprising the 3-HP starting material, as well as the oxidation products of the same and means for the adjustment of pH, and oxygen or an oxygen-containing gas can be conducted in parallel flow or counter-flow. In the liquid-phase procedure the liquid phase and the gas phase are conveniently conducted in parallel flow.

[0397] In order to achieve a sufficiently short reaction time, the conversion is carried out at a pH equal or greater than 6, such as at least 7, and in particular between 7.5 and 9. According to a particular embodiment, during the oxidation reaction the pH is kept constant, such as at a pH in the range between 7.5 and 9, by adding a base, such as an alkaline or alkaline earth hydroxide solution. The oxidation is usefully carried out at a temperature of at least 10° C. and maximally 70° C. The flow of oxygen is not limited. In the suspension method it is important that the liquid and the gaseous phase are brought into contact by stirring vigorously. Malonic acid can be obtained in nearly quantitative yields. U.S. Pat. No. 5,817,870 is incorporated by reference herein for its methods to oxidize 3-HP to malonic acid.

[0398] 1,3-Propanediol may be produced from hydrogenation of 3-HP as produced herein. U.S. Patent Publication No. 2005/0283029 (Meng et al.) is incorporated by reference herein for its methods to hydrogenation of 3-HP, or esters of the acid or mixtures, in the presence of a specific catalyst, in a liquid phase, to prepare 1,3-propanediol. Possible catalysts include ruthenium metal, or compounds of ruthenium, supported or unsupported, alone or in combination with at least one or more additional metal(s) selected from molybdenum, tungsten, titanium, zirconium, niobium, vanadium or chromium. The ruthenium metal or compound thereof, and/or the additional metal(s), or compound thereof, may be utilized in supported or unsupported form. If utilized in supported form, the method of preparing the supported catalyst is not critical and can be any technique such as impregnation of the support or deposition on the support. Any suitable support may be utilized. Supports that may be used include, but are not limited to, alumina, titania, silica, zirconia, carbons, carbon blacks, graphites, silicates, zeolites, aluminosilicate zeolites, aluminosilicate clays, and the like.

[0399] The hydrogenation process may be carried out in liquid phase. The liquid phase includes water, organic solvents that are not hydrogenatable, such as any aliphatic or aromatic hydrocarbon, alcohols, ethers, toluene, decalin, dioxane, diglyme, n-heptane, hexane, xylene, benzene, tetrahydrofuran, cyclohexane, methylcyclohexane, and the like, and mixtures of water and organic solvent(s). The hydrogenation process may be carried out batch wise, semi-continuously, or continuously. The hydrogenation process may be carried out in any suitable apparatus. Exemplary of such apparatus are stirred tank reactors, trickle-bed reactors, high pressure hydrogenation reactors, and the like.

[0400] The hydrogenation process is generally carried out at a temperature ranging from about 20 to about 250° C., more particularly from about 100 to about 200° C. Further, the hydrogenation process is generally carried out in a pressure range of from about 20 psi to about 4000 psi. The hydrogen containing gas utilized in the hydrogenation process is, optionally, commercially pure hydrogen. The hydrogen containing gas is usable if nitrogen, gaseous hydrocarbons, or oxides of carbon, and similar materials, are present in the hydrogen containing gas. For example, hydrogen from synthesis gas (hydrogen and carbon monoxide) may be employed, such synthesis gas potentially further including carbon dioxide, water, and various impurities.

[0401] As is known in the art, it is also possible to convert 3-HP to 1,3-propanediol using biological methods. For example, 1,3-propanediol can be created from either 3-HP-CoA or 3-HP via the use of polypeptides having enzymatic activity. These polypeptides can be used either in vitro or in vivo. When converting 3-HP-CoA to 1,3-propanediol, polypeptides having oxidoreductase activity or reductase activity (e.g., enzymes from the 1.1.1.-class of enzymes) can be used. Alternatively, when creating 1,3-propanediol from 3-HP, a combination of a polypeptide having aldyhyde dehydrogenase activity (e.g., an enzyme from the 1.1.1.34 class) and a polypeptide having alcohol dehydrogenase activity (e.g., an enzyme from the 1.1.1.32 class) can be used.

[0402] Another downstream production of 3-HP, acrylonitrile, may be converted from acrylic acid by various organic syntheses, including by not limited to the Sohio acrylonitrile process, a single-step method of production known in the chemical manufacturing industry

[0403] Also, addition reactions may yield acrylic acid or acrylate derivatives having alkyl or aryl groups at the carbonyl hydroxyl group. Such additions may be catalyzed chemically, such as by hydrogen, hydrogen halides, hydrogen cyanide, or Michael additions under alkaline conditions optionally in the presence of basic catalysts. Alcohols, phenols, hydrogen sulfide, and thiols are known to add under basic conditions. Aromatic amines or amides, and aromatic hydrocarbons, may be added under acidic conditions. These and other reactions are described in Ulmann's Encyclopedia of Industrial Chemistry, Acrylic Acid and Derivatives, Wiley VCH Verlag GmbH, Wienham (2005), incorporated by reference for its teachings of conversion reactions for acrylic acid and its derivatives.

[0404] Acrylic acid obtained from 3-HP made by the present invention may be further converted to various chemicals, including polymers, which are also considered downstream products in some embodiments. Acrylic acid esters may be formed from acrylic acid (or directly from 3-HP) such as by condensation esterification reactions with an alcohol, releasing water. This chemistry described in Monomeric Acrylic Esters, E. H. Riddle, Reinhold, N.Y. (1954), incorporated by reference for its esterification teachings. Among esters that are formed are methyl acrylate, ethyl acrylate, n-butyl acrylate, hydroxypropyl acrylate, hydroxyethyl acrylate, isobutyl acrylate, and 2-ethylhexyl acrylate, and these and/or other acrylic acid and/or other acrylate esters may be combined, including with other compounds, to form various known acrylic acid-based polymers. Although acrylamide is produced in chemical syntheses by hydration of acrylonitrile, herein a conversion may convert acrylic acid to acrylamide by amidation.

[0405] Acrylic acid obtained from 3-HP made by the present invention may be further converted to various chemicals, including polymers, which are also considered downstream products in some embodiments. Acrylic acid esters may be formed from acrylic acid (or directly from 3-HP) such as by condensation esterification reactions with an alcohol, releasing water. This chemistry is described in Monomeric Acrylic Esters, E. H. Riddle, Reinhold, N.Y. (1954), incorporated by reference for its esterification teachings. Among esters that are formed are methyl acrylate, ethyl acrylate, n-butyl acrylate, hydroxypropyl acrylate, hydroxyethyl acrylate, isobutyl acrylate, and 2-ethylhexyl acrylate, and these and/or other acrylic acid and/or other acrylate esters may be combined, including with other compounds, to form various known acrylic acid-based polymers. Although acrylamide is produced in chemical syntheses by hydration of acrylonitrile, herein a conversion may convert acrylic acid to acrylamide by amidation.

[0406] Direct esterification of acrylic acid can take place by esterification methods known to the person skilled in the art, by contacting the acrylic acid obtained from 3-HP dehydration with one or more alcohols, such as methanol, ethanol, 1-propanol, 2-propanol, n-butanol, tert-butanol or isobutanol, and heating to a temperature of at least 50, 75, 100, 125, or 150° C. The water formed during esterification may be removed from the reaction mixture, such as by azeotropic distillation through the addition of suitable separation aids, or by another means of separation. Conversions up to 95%, or more, may be realized, as is known in the art.

[0407] Several suitable esterification catalysts are commercially available, such as from Dow Chemical (Midland, Mich. US). For example, Amberlyst™ 131 Wet Monodisperse gel catalyst confers enhanced hydraulic and reactivity properties and is suitable for fixed bed reactors. Amberlyst™ 39Wet is a macroreticular catalyst suitable particularly for stirred and slurry loop reactors. Amberlyst™ 46 is a macroporous catalyst producing less ether byproducts than conventional catalyst (as described in U.S. Pat. No. 5,426,199 to Rohm and Haas, which patent is incorporated by reference for its teachings of esterification catalyst compositions and selection considerations).

[0408] Acrylic acid, and any of its esters, may be further converted into various polymers. Polymerization may proceed by any of heat, light, other radiation of sufficient energy, and free radical generating compounds, such as azo compounds or peroxides, to produce a desired polymer of acrylic acid or acrylic acid esters. As one example, an aqueous acrylic acid solution's temperature raised to a temperature known to start polymerization (in part based on the initial acrylic acid concentration), and the reaction proceeds, the process frequently involving heat removal given the high exothermicity of the reaction. Many other methods of polymerization are known in the art. Some are described in Ulmann's Encyclopedia of Industrial Chemistry, Polyacrylamides and Poly(Acrylic Acids), Wiley VCH Verlag GmbH, Wienham (2005), incorporated by reference for its teachings of polymerization reactions.

[0409] For example, the free-radical polymerization of acrylic acid takes place by polymerization methods known to the skilled worker and can be carried out either in an emulsion or suspension in aqueous solution or another solvent. Initiators, such as but not limited to organic peroxides, often are added to aid in the polymerization. Among the classes of organic peroxides that may be used as initiators are diacyls, peroxydicarbonates, monoperoxycarbonates, peroxyketals, peroxyesters, dialkyls, and hydroperoxides. Another class of initiators is azo initiators, which may be used for acrylate polyermization as well as co-polymerization with other monomers. U.S. Pat. Nos. 5,470,928; 5,510,307; 6,709,919; and 7,678,869 teach various approaches to polymerization using a number of initiators, including organic peroxides, azo compounds, and other chemical types, and are incorporated by reference for such teachings as applicable to the polymers described herein.

[0410] Accordingly, it is further possible for co-monomers, such as crosslinkers, to be present during the polymerization. The free-radical polymerization of the acrylic acid obtained from dehydration of 3-HP, as produced herein, in at least partly neutralized form and in the presence of crosslinkers is practiced in certain embodiments. This polymerization may result in hydrogels which can then be comminuted, ground and, where appropriate, surface-modified, by known techniques.

[0411] An important commercial use of polyacrylic acid is for superabsorbent polymers. This specification hereby incorporates by reference Modern Superabsorbent Polymer Technology, Buchholz and Graham (Editors), Wiley-VCH, 1997, in its entirety for its teachings regarding superabsorbent polymers components, manufacture, properties and uses. Superabsorbent polymers are primarily used as absorbents for water and aqueous solutions for diapers, adult incontinence products, feminine hygiene products, and similar consumer products. In such consumer products, superabsorbent materials can replace traditional absorbent materials such as cloth, cotton, paper wadding, and cellulose fiber. Superabsorbent polymers absorb, and retain under a slight mechanical pressure, up to 25 times or their weight in liquid. The swollen gel holds the liquid in a solid, rubbery state and prevents the liquid from leaking. Superabsorbent polymer particles can be surface-modified to produce a shell structure with the shell being more highly crosslinked. This technique improves the balance of absorption, absorption under load, and resistance to gel-blocking. It is recognized that superabsorbent polymers have uses in fields other than consumer products, including agriculture, horticulture, and medicine.

[0412] Superabsorbent polymers are prepared from acrylic acid (such as acrylic acid derived from 3 HP provided herein) and a crosslinker, by solution or suspension polymerization. Exemplary methods include U.S. Pat. Nos. 5,145,906; 5,350,799; 5,342,899; 4,857,610; 4,985,518; 4,708,997; 5,180,798; 4,666,983; 4,734,478; and 5,331,059, each incorporated by reference for their teachings relating to superabsorbent polymers.

[0413] Among consumer products, a diaper, a feminine hygiene product, and an adult incontinence product are made with superabsorbent polymer that itself is made substantially from acrylic acid converted from 3-HP made in accordance with the present invention.

[0414] Diapers and other personal hygiene products may be produced that incorporate superabsorbent polymer made from acrylic acid made from 3-HP which is bio-produced by the teachings of the present application. The following provides general guidance for making a diaper that incorporates such superabsorbent polymer. The superabsorbent polymer first is prepared into an absorbent pad that may be vacuum formed, and in which other materials, such as a fibrous material (e.g., wood pulp) are added. The absorbent pad then is assembled with sheet(s) of fabric, generally a nonwoven fabric (e.g., made from one or more of nylon, polyester, polyethylene, and polypropylene plastics) to form diapers.

[0415] More particularly, in one non-limiting process, above a conveyer belt multiple pressurized nozzles spray superabsorbent polymer particles (such as about 400 micron size or larger), fibrous material, and/or a combination of these onto the conveyer belt at designated spaces/intervals. The conveyor belt is perforated and under vacuum from below, so that the sprayed on materials are pulled toward the belt surface to form a flat pad. In various embodiments, fibrous material is applied first on the belt, followed by a mixture of fibrous material and the superabsorbent polymer particles, followed by fibrous material, so that the superabsorbent polymer is concentrated in the middle of the pad. A leveling roller may be used toward the end of the belt path to yield pads of uniform thickness. Each pad thereafter may be further processed, such as to cut it to a proper shape for the diaper, or the pad may be in the form of a long roll sufficient for multiple diapers. Thereafter, the pad is sandwiched between a top sheet and a bottom sheet of fabric (one generally being liquid pervious, the other liquid impervious), such as on a conveyor belt, and these are attached together such as by gluing, heating or ultrasonic welding, and cut into diaper-sized units (if not previously so cut). Additional features may be provided, such as elastic components, strips of tape, etc., for fit and ease of wearing by a person. FIGS. 34A, B, and C and FIGS. 35 A and B show a schematic of an entire process of converting biomass to a finished product such as a diaper. These are meant to be exemplary and not limiting.

[0416] The ratio of the fibrous material to polymer particles is known to effect performance characteristics. In some embodiments, this ratio is between 75:25 and 90:10 (see U.S. Pat. No. 4,685,915, incorporated by reference for its teachings of diaper manufacture). Other disposable absorbent articles may be constructed in a similar fashion, such as for adult incontinence, feminine hygiene (sanitary napkins), tampons, etc. (see, for example, U.S. Pat. Nos. 5,009,653, 5,558,656, and 5,827,255 incorporated by reference for their teachings of sanitary napkin manufacture).

[0417] Low molecular-weight polyacrylic acid has uses for water treatment, flocculants, and thickeners for various applications including cosmetics and pharmaceutical preparations. For these applications, the polymer may be uncrosslinked or lightly crosslinked, depending on the specific application. The molecular weights are typically from about 200 to about 1,000,000 g/mol. Preparation of these low molecular-weight polyacrylic acid polymers is described in U.S. Pat. Nos. 3,904,685; 4,301,266; 2,798,053; and 5,093,472, each of which is incorporated by reference for its teachings relating to methods to produce these polymers.

[0418] Acrylic acid may be co-polymerized with one or more other monomers selected from acrylamide, 2-acrylamido-2-methylpropanesulfonic acid, N,N-dimethylacrylamide, N-isopropylacrylamide, methacrylic acid, and methacrylamide, to name a few. The relative reactivities of the monomers affect the microstructure and thus the physical properties of the polymer. Co-monomers may be derived from 3-HP, or otherwise provided, to produce co-polymers. Ulmann's Encyclopedia of Industrial Chemistry, Polyacrylamides and Poly(Acrylic Acids), Wiley VCH Verlag GmbH, Wienham (2005), is incorporated by reference herein for its teachings of polymer and co-polymer processing.

[0419] Acrylic acid can in principle be copolymerized with almost any free-radically polymerizable monomers including styrene, butadiene, acrylonitrile, acrylic esters, maleic acid, maleic anhydride, vinyl chloride, acrylamide, itaconic acid, and so on. End-use applications typically dictate the co-polymer composition, which influences properties. Acrylic acid also may have a number of optional substitutions on it, and after such substitutions be used as a monomer for polymerization, or co-polymerization reactions. As a general rule, acrylic acid (or one of its co-polymerization monomers) may be substituted by any substituent that does not interfere with the polymerization process, such as alkyl, alkoxy, aryl, heteroaryl, benzyl, vinyl, allyl, hydroxy, epoxy, amide, ethers, esters, ketones, maleimides, succinimides, sulfoxides, glycidyl and silyl (see U.S. Pat. No. 7,678,869, incorporated by reference above, for further discussion). The following paragraphs provide a few non-limiting examples of copolymerization applications.

[0420] Paints that comprise polymers and copolymers of acrylic acid and its esters are in wide use as industrial and consumer products. Aspects of the technology for making such paints can be found in U.S. Pat. Nos. 3,687,885 and 3,891,591, incorporated by reference for its teachings of such paint manufacture. Generally, acrylic acid and its esters may form homopolymers or copolymers among themselves or with other monomers, such as amides, methacrylates, acrylonitrile, vinyl, styrene and butadiene. A desired mixture of homopolymers and/or copolymers, referred to in the paint industry as ‘vehicle’ (or ‘binder’) are added to an aqueous solution and agitated sufficiently to form an aqueous dispersion that includes sub-micrometer sized polymer particles. The paint cures by coalescence of these ‘vehicle’ particles as the water and any other solvent evaporate. Other additives to the aqueous dispersion may include pigment, filler (e.g., calcium carbonate, aluminum silicate), solvent (e.g., acetone, benzol, alcohols, etc., although these are not found in certain no VOC paints), thickener, and additional additives depending on the conditions, applications, intended surfaces, etc. In many paints, the weight percent of the vehicle portion may range from about nine to about 26 percent, but for other paints the weight percent may vary beyond this range.

[0421] Acrylic-based polymers are used for many coatings in addition to aints. For example, for paper coating latexes, acrylic acid is used from 0.1-5.0%, along with styrene and butadiene, to enhance binding to the paper and modify rheology, freeze-thaw stability and shear stability. In this context, U.S. Pat. Nos. 3,875,101 and 3,872,037 are incorporated by reference for their teachings regarding such latexes. Acrylate-based polymers also are used in many inks, particularly UV curable printing inks. For water treatment, acrylamide and/or hydroxy ethyl acrylate are commonly co-polymerized with acrylic acid to produce low molecular-weight linear polymers. In this context, U.S. Pat. Nos. 4,431,547 and 4,029,577 are incorporated by reference for their teachings of such polymers. Co-polymers of acrylic acid with maleic acid or itaconic acid are also produced for water-treatment applications, as described in U.S. Pat. No. 5,135,677, incorporated by reference for that teaching. Sodium acrylate (the sodium salt of glacial acrylic acid) can be co-polymerized with acrylamide (which may be derived from acrylic acid via amidation chemistry) to make an anionic co-polymer that is used as a flocculant in water treatment.

[0422] For thickening agents, a variety of co-monomers can be used, such as described in U.S. Pat. Nos. 4,268,641 and 3,915,921, incorporated by reference for description of these co-monomers. U.S. Pat. No. 5,135,677 describes a number of co-monomers that can be used with acrylic acid to produce water-soluble polymers, and is incorporated by reference for such description.

[0423] Also as noted, some conversions to downstream products may be made enzymatically. For example, 3-HP may be converted to 3-HP-CoA, which then may be converted into polymerized 3-HP with an enzyme having polyhydroxyacid synthase activity (EC 2.3.1.-). Also, 1,3-propanediol can be made using polypeptides having oxidoreductase activity or reductase activity (e.g., enzymes in the EC 1.1.1.-class of enzymes). Alternatively, when creating 1,3-propanediol from 3HP, a combination of (1) a polypeptide having aldehyde dehydrogenase activity (e.g., an enzyme from the 1.1.1.34 class) and (2) a polypeptide having alcohol dehydrogenase activity (e.g., an enzyme from the 1.1.1.32 class) can be used. Polypeptides having lipase activity may be used to form esters. Enzymatic reactions such as these may be conducted in vitro, such as using cell-free extracts, or in vivo. Thus, various embodiments of the present invention, such as methods of making a chemical, include conversion steps to any such noted downstream products of microbially produced 3-HP, including but not limited to those chemicals described herein and in the incorporated references (the latter for jurisdictions allowing this). For example, one embodiment is making 3-HP molecules by the teachings herein and further converting the 3-HP molecules to polymerized-3-HP (poly-3-HP) or acrylic acid, and such as from acrylic acid then producing from the 3-HP molecules any one of polyacrylic acid (polymerized acrylic acid, in various forms), methyl acrylate, acrylamide, acrylonitrile, propiolactone, ethyl 3-HP, malonic acid, 1,3-propanediol, ethyl acrylate, n-butyl acrylate, hydroxypropyl acrylate, hydroxyethyl acrylate, isobutyl acrylate, 2-ethylhexyl acrylate, and acrylic acid or an acrylic acid ester to which an alkyl or aryl addition is made, and/or to which halogens, aromatic amines or amides, and aromatic hydrocarbons are added.

[0424] Also as noted, some conversions to downstream products may be made enzymatically. For example, 3-HP may be converted to 3-HP-CoA, which then may be converted into polymerized 3-HP with an enzyme having polyhydroxyacid synthase activity (EC 2.3.1.-). Also, 1,3-propanediol can be made using polypeptides having oxidoreductase activity or reductase activity (e.g., enzymes in the EC 1.1.1.-class of enzymes). Alternatively, when creating 1,3-propanediol from 3HP, a combination of (1) a polypeptide having aldehyde dehydrogenase activity (e.g., an enzyme from the 1.1.1.34 class) and (2) a polypeptide having alcohol dehydrogenase activity (e.g., an enzyme from the 1.1.1.32 class) can be used. Polypeptides having lipase activity may be used to form esters. Enzymatic reactions such as these may be conducted in vitro, such as using cell-free extracts, or in vivo.

[0425] Thus, various embodiments of the present invention, such as methods of making a chemical, include conversion steps to any such noted downstream products of microbially produced 3-HP, including but not limited to those chemicals described herein and in the incorporated references (the latter for jurisdictions allowing this). For example, one embodiment is making 3-HP molecules by the teachings herein and further converting the 3-HP molecules to polymerized-3-HP (poly-3-HP) or acrylic acid, and such as from acrylic acid then producing from the 3-HP molecules any one of polyacrylic acid (polymerized acrylic acid, in various forms), methyl acrylate, acrylamide, acrylonitrile, propiolactone, ethyl 3-HP, malonic acid, 1,3-propanediol, ethyl acrylate, n-butyl acrylate, hydroxypropyl acrylate, hydroxyethyl acrylate, isobutyl acrylate, 2-ethylhexyl acrylate, and acrylic acid or an acrylic acid ester to which an alkyl or aryl addition is made, and/or to which halogens, aromatic amines or amides, and aromatic hydrocarbons are added.

[0426] Reactions that form downstream compounds such as acrylates or acrylamides can be conducted in conjunction with use of suitable stabilizing agents or inhibiting agents reducing likelihood of polymer formation. See, for example, U.S. Patent Publication No. 2007/0219390 A1. Stabilizing agents and/or inhibiting agents include, but are not limited to, e.g., phenolic compounds (e.g., dimethoxyphenol (DMP) or alkylated phenolic compounds such as di-tert-butyl phenol), quinones (e.g., t-butyl hydroquinone or the monomethyl ether of hydroquinone (MEHQ)), and/or metallic copper or copper salts (e.g., copper sulfate, copper chloride, or copper acetate). Inhibitors and/or stabilizers can be used individually or in combinations as will be known by those of skill in the art. Also, in various embodiments, the one or more downstream compounds is/are recovered at a molar yield of up to about 100 percent, or a molar yield in the range from about 70 percent to about 90 percent, or a molar yield in the range from about 80 percent to about 100 percent, or a molar yield in the range from about 90 percent to about 100 percent. Such yields may be the result of single-pass (batch or continuous) or iterative separation and purification steps in a particular process.

[0427] Acrylic acid and other downstream products are useful as commodities in manufacturing, such as in the manufacture of consumer goods, including diapers, textiles, carpets, paint, adhesives, and acrylic glass.

### EXAMPLES

[0428] The following examples are given for the purpose of illustrating various embodiments of the invention and are not meant to limit the present invention in any fashion. Changes therein and other uses which are encompassed within the spirit of the invention as defined by the scope of the claims will occur to those skilled in the art.

### Common Methods

### Common Method Example 1

### Microorganism Species and Strains

[0429] Bacterial species, that may be utilized as needed, are as follows:

[0430] Acinetobacter calcoaceticus (DSMZ #1139) is obtained from the German Collection of Microorganisms and Cell Cultures (Braunschweig, Germany) as a vacuum dried culture. Cultures are then resuspended in Brain Heart Infusion (BHI) Broth (RPI Corp., Mt. Prospect, Ill., USA). Serial dilutions of the resuspended A. calcoaceticus culture are made into BHI and are allowed to grow for aerobically for 48 hours at 37° C. at 250 rpm until saturated.

[0431] Bacillus subtilis is a gift from the Gill lab (University of Colorado at Boulder, Boulder Colo. USA) and is obtained as an actively growing culture. Serial dilutions of the actively growing B. subtilis culture are made into Luria Broth (RPI Corp., Mt. Prospect, Ill., USA) and are allowed to grow for aerobically for 24 hours at 37° C. at 250 rpm until saturated.

[0432] Chlorobium limicola (DSMZ#245) is obtained from the German Collection of Microorganisms and Cell Cultures (Braunschweig, Germany) as a vacuum dried culture. Cultures are then resuspended using Pfennig's Medium I and II (#28 and 29) as described per DSMZ instructions. C. limicola is grown at 25° C. under constant vortexing.

[0433] Citrobacter braakii (DSMZ #30040) is obtained from the German Collection of Microorganisms and Cell Cultures (Braunschweig, Germany) as a vacuum dried culture. Cultures are then resuspended in Brain Heart Infusion (BHI) Broth (RPI Corp., Mt. Prospect, Ill. USA). Serial dilutions of the resuspended C. braakii culture are made into BHI and are allowed to grow for aerobically for 48 hours at 30° C. at 250 rpm until saturated.

[0434] Clostridium acetobutylicum (DSMZ #792) is obtained from the German Collection of Microorganisms and Cell Cultures (Braunschweig, Germany) as a vacuum dried culture. Cultures are then resuspended in Clostridium acetobutylicum medium (#411) as described per DSMZ instructions. C. acetobutylicum is grown anaerobically at 37° C. at 250 rpm until saturated.

[0435] Clostridium aminobutyricum (DSMZ #2634) is obtained from the German Collection of Microorganisms and Cell Cultures (Braunschweig, Germany) as a vacuum dried culture. Cultures are then resuspended in Clostridium aminobutyricum medium (#286) as described per DSMZ instructions. C. aminobutyricum is grown anaerobically at 37° C. at 250 rpm until saturated.

[0436] Clostridium kluyveri (DSMZ #555) is obtained from the German Collection of Microorganisms and Cell Cultures (Braunschweig, Germany) as an actively growing culture. Serial dilutions of C. kluyveri culture are made into Clostridium kluyveri medium (#286) as described per DSMZ instructions. C. kluyveri is grown anaerobically at 37° C. at 250 rpm until saturated.

[0437] Cupriavidus metallidurans (DMSZ #2839) is obtained from the German Collection of Microorganisms and Cell Cultures (Braunschweig, Germany) as a vacuum dried culture. Cultures are then resuspended in Brain Heart Infusion (BHI) Broth (RPI Corp., Mt. Prospect, Ill. USA). Serial dilutions of the resuspended C. metallidurans culture are made into BHI and are allowed to grow for aerobically for 48 hours at 30° C. at 250 rpm until saturated.

[0438] Cupriavidus necator (DSMZ #428) is obtained from the German Collection of Microorganisms and Cell Cultures (Braunschweig, Germany) as a vacuum dried culture. Cultures are then resuspended in Brain Heart Infusion (BHI) Broth (RPI Corp., Mt. Prospect, Ill. USA). Serial dilutions of the resuspended C. necator culture are made into BHI and are allowed to grow for aerobically for 48 hours at 30° C. at 250 rpm until saturated. As noted elsewhere, previous names for this species are Alcaligenes eutrophus and Ralstonia eutrophus.

[0439] Desulfovibrio fructosovorans (DSMZ #3604) is obtained from the German Collection of Microorganisms and Cell Cultures (Braunschweig, Germany) as a vacuum dried culture. Cultures are then resuspended in Desulfovibrio fructosovorans medium (#63) as described per DSMZ instructions. D. fructosovorans is grown anaerobically at 37° C. at 250 rpm until saturated.

[0440] Escherichia coli Crooks (DSMZ#1576) is obtained from the German Collection of Microorganisms and Cell Cultures (Braunschweig, Germany) as a vacuum dried culture. Cultures are then resuspended in Brain Heart Infusion (BHI) Broth (RPI Corp., Mt. Prospect, Ill. USA). Serial dilutions of the resuspended E. coli Crooks culture are made into BHI and are allowed to grow for aerobically for 48 hours at 37° C. at 250 rpm until saturated.

[0441] Escherichia coli 12 a gift from the Gill lab (University of Colorado at Boulder, Boulder, Colo. USA) and is obtained as an actively growing culture. Serial dilutions of the actively growing E. coli K12 culture are made into Luria Broth (RPI Corp., Mt. Prospect, Ill. USA) and are allowed to grow for aerobically for 24 hours at 37° C. at 250 rpm until saturated.

[0442] Halobacterium salinarum (DSMZ#1576) is obtained from the German Collection of Microorganisms and Cell Cultures (Braunschweig, Germany) as a vacuum dried culture. Cultures are then resuspended in Halobacterium medium (#97) as described per DSMZ instructions. H. salinarum is grown aerobically at 37° C. at 250 rpm until saturated.

[0443] Lactobacillus delbruecki (#4335) is obtained from WYEAST USA (Odell, Oreg. USA) as an actively growing culture. Serial dilutions of the actively growing L. delbruecki culture are made into Brain Heart Infusion (BHI) broth (RPI Corp., Mt. Prospect, Ill. USA) and are allowed to grow for aerobically for 24 hours at 30° C. at 250 rpm until saturated.

[0444] Metallosphaera sedula (DSMZ #5348) is obtained from the German Collection of Microorganisms and Cell Cultures (Braunschweig, Germany) as an actively growing culture. Serial dilutions of M. sedula culture are made into Metallosphaera medium (#485) as described per DSMZ instructions. M. sedula is grown aerobically at 65° C. at 250 rpm until saturated.

[0445] Propionibacterium freudenreichii subsp. shermanii (DSMZ#4902) is obtained from the German Collection of Microorganisms and Cell Cultures (Braunschweig, Germany) as a vacuum dried culture. Cultures are then resuspended in PYG-medium (#104) as described per DSMZ instructions. P. freudenreichii subsp. shermanii is grown anaerobically at 30° C. at 250 rpm until saturated.

[0446] Pseudomonas putida is a gift from the Gill Lab (University of Colorado at Boulder, Boulder, Colo. USA) and is obtained as an actively growing culture. Serial dilutions of the actively growing P. putida culture are made into Luria Broth (RPI Corp., Mt. Prospect, Ill. USA) and are allowed to grow for aerobically for 24 hours at 37° C. at 250 rpm until saturated.

[0447] Streptococcus mutans (DSMZ#6178) is obtained from the German Collection of Microorganisms and Cell Cultures (Braunschweig, Germany) as a vacuum dried culture. Cultures are then resuspended in Luria Broth (RPI Corp., Mt. Prospect, Ill. USA). S. mutans is grown aerobically at 37° C. at 250 rpm until saturated.

[0448] The following non-limiting strains may also be used as starting strains in the Examples: DF40 Hfr(P02A), garB10, fhuA22, ompF627(T2R), fadL701(T2R), relAl, pitA10, spoT1, rrnB-2, pgi-2, mcrB1, creC510, BW25113 F-, Δ(araD-araB)567, ΔlacZ4787(::rrnB-3), &lambda•, rph-1, Δ(rhaD-rhaB)568, hsdR514, JP111Hfr(P01), galE45(Gal 5), &lambda⁻, fab/392(ts), relAl, spoil, thi-1. These strains possess recognized genetic modifications, and are available from public culture sources such as the Yale Coli Genetic Stock Collection (New Haven, Conn. USA). Strains developed from these strains are described in the Examples.

### Common Method Example 2

### Cultures and Growth Media

[0449] Bacterial growth culture media and associated materials and conditions, are as follows:

[0450] Fed-batch medium contained (per liter): 10 g tryptone, 5 g yeast extract, 1.5 g NaCl, 2 g Na2HPO4.7H2O, 1 g KH2PO4, and glucose as indicated.

[0451] AM2 medium contained (per liter): 2.87 g K₂HPO₄, 1.50 g KH₂PI₄, 3.13 g (NH₄)₂SO₄, 0.15 g KCl, 1.5 mM MgSO₄, 0.1M K⁺ MOPS pH 7.2, 30 g glucose, and 1 ml trace Mineral Stock prepared as described in Martinez et al. Biotechnol Lett 29:397-404 (2007). Concentration of glucose in glucose feed for AM2 vessels: 200 g/L glucose.

[0452] AM2 Medium used in Fermenters for Initial Batch Medium

| | | |
|---|---|---|
| K2HP04 | 2.87 | g/L |
| KH2P04 | 1.50 | g/L |
| (NH4)2S04 | 3.13 | g/L |
| KCl | 0.15 | g/L |
| Glucose | 6.0 | g/L |
| MgS04 | 0.18 | g/L |
| AM2 Trace Metals | 1.0 | ml/L |
| Stock Solution | | |
| Calcium | 0.005 | g/L |
| Ampicillin | 0.1 | g/L |
| Kanamycin | 0.02 | g/L |
| Chloramphenicol | 0.02 | g/L |

[0453] Trace Metals Stock Solution for AM2 Medium Used in Fermenters

| | | |
|---|---|---|
| Concentrated HCl | 10.0 | ml/L |
| FeCl₃•6H₂O | 2.4 | g/L |
| CoC₁₂•6 H₂O | 0.17 | g/L |
| CuCb•2 H₂O | 0.15 | g/L |
| ZnCb | 0.3 | g/L |
| Na₂MoO₄•2H₂O | 0.3 | g/L |
| H₃BO₃ | 0.07 | g/L |
| MnCb•4H₂O | 0.5 | g/L |

[0454] Rich Medium Used in Fermenters Initial Batch Medium

| | |
|---|---|
| Tryptone | 10 g/L |
| Yeast Extract | 5 g/L |
| Glucose | 4 g/L |
| Na₂HPO₄•7H₂O | 2 g/L |
| KH₂PO₄ | 1 g/L |
| MgSO₄ | 2 g/L |
| Ampicillin | 0.1 g/L |
| Kanamycin | 0.02 g/L |
| Chloramphenicol | 0.02 g/L |

[0455] Feed Formulation for Additional Glucose Feed for Rich Media

| | |
|---|---|
| Glucose | 200 g/L |
| (NH₄)₂SO₄ | 30 g/L |
| KH₂PO₄ | 7.5 g/L |
| Citric Acid | 3 g/L |
| MgSO₄ | 2.93 g/L |
| FeSO₄•7H₂O | 0.05 g/L |

[0456] SM3 minimal medium for E. coli (Final phosphate concentration=27.5 mM; Final N concentration=47.4 mM NH₄⁺).

[0457] Components per liter: 700 mL DI water, 100 mL 10×SM3 Salts, 2 ml 1M MgSO₄, 1 mL 100× Trace Mineral Stock, 60 mL 500 g/L glucose, 100 mL 0.1 M MOPS (pH 7.4), 0.1 mL of 1 M CaCl₂, Q.S. with DI water to 1000 mL, and 0.2 μm filter sterilize.

[0458] To Make SM8 Minimal Media

[0459] SM8 minimal medium for E. coli (Final phosphate concentration=3.2 mM; Final N concentration=45 mM NH₄)⁺. Components per liter: 600 mL DI water, 100 mL 10×FM8 Salts, 2.26 mL 1M MgSO₄, 2 mL FM10 Trace Mineral Stock, 10 mL 100 g/L yeast extract, 60 mL 500 g/L glucose, 200 mL 1M MOPS (pH 7.4), Q.S. with DI water to 1000 mL, and 0.2 μm filter sterilize.

[0460] Preparation of Stock Solutions:

[0461] To make 10×SM3 Salts (1 L): 800 mL DI water, 28.7 g K₂HPO₄, 15 g KH₂PO₄, 31.3 g (NH₄)₂SO₄, 1.5 g KCl, 0.5 g Citric Acid (anhydrous), and Q.S. with DI water to 1000 mL.

[0462] To make 100× Trace Mineral Stock (1 L): save in 50-mL portions at room temp: Per liter in 0.12M HCl (dilute 10 mL cone HCl into 1 liter water):2.4 g FeCL₃ 6H₂O, 0.17 g CoCh₆H₂O, 0.15 g CuCl₂, 2H₂O, 0.3 g ZnCl₂, 0.3 g NaMoO₄.2H₂O (Molybdic acid, disodium salt, dihydrate), 0.07 g H₃BO₃, and 0.5 g MnCh₄H₂O.

[0463] To make 1M MOPS:209.3 g MOPS, dissolve in 700 mL water. Take 70-mL portions and adjust to desired pH with 50% KOH, adjust to 100 mL final volume, and 0.2 μm filter sterilize.

[0464] To make 1M MgSO₄:120.37 g dissolved in 1000 mL water.

[0465] To make 500 g/L (50%) glucose stock solution: 900 mL DI water, 500 g glucose, and Q.S. to 1000 mL.

[0466] To make 10×FM8 Salts (1 L): 800 mL DI water, 3.29 g K₂HPO₄, 1.73 g KH₂PO₄, 30 g (NH₄)₂SO₄, 1.5 g Citric Acid (anhydrous), and Q.S. with DI water to 1000 mL.

[0467] To make FM10 Trace Mineral Stock (100 mL): 50 mL DI water, 1 mL 13M HCl, 4.9 g CaCl₂*2H₂O, 0.97 g FeCL₃.6H₂O, 0.04 g CoCl₂.6H₂O, 0.27 g CuCl₂.H₂O, 0.02 g ZnCl₂, 0.024 g NaMoO₄.2H₂O, 0.007 g H₃BO₃, and 0.036 g MnCl₂.4H₂O, Q.S. with DI water to 100 mL.

[0468] To make 1M MOPS: 209.3 g MOPS, dissolve in 700 mL water, take 70-mL portions and adjust to desired pH with 50% KOH, adjust to 100 mL final volume, and 0.2 μm filter sterilize.

[0469] To make 1M MgSO₄: 120.37 g dissolved in 1000 mL water.

[0470] To make 500 g/L (50%) glucose stock solution: 900 mL DI water, 500 g glucose, and Q.S. to 1000 mL.

[0471] To make 100 g/L yeast extract: 900 mL water: 100 g yeast extract, and Q.S. to 1000 mL.

[0472] Additional Growth Media Formulation(s) is/are summarized as:

| | | Concentration | |
|---|---|---|---|
| | Ingredient | in FM11 | |
| 1 | K₂HPO₄ | 0.329 | g/L |
| 2 | KH₂PO₄ | 0.173 | g/L |
| 3 | (NH₄)₂SO₄ | 3 | g/L |
| 4 | NaCl | — | |
| 5 | Citric Acid•H₂O | 0.15 | g/L |
| 6 | Yeast Extract | 1 | g/L |
| 7 | Antifoam 204 | 0.1 | mL/L |
| 8 | Glucose | 30 | g/L |
| 9 | MgSO₄•7H₂O | 0.82 | g/L |
| 10 | FM10 Trace | 2 | mL/L |
| | Metals Stock | | |
| | Solution | | |
| 11 | Kanamycin | 35 | mg/L |
| 12 | Chloramphenicol | 20 | mg/L |
| 13 | 1000x Vitamin | 1.25 | mL/L |
| | Mixture | | |

[0473] FM10: Trace Metals Stock Solution formulation:

| Ingredient | Concentration | |
|---|---|---|
| Concentrated HCl | 10.0 | ml/L |
| CaC1₂•2H₂O | 49 | g/L |
| FeC1₃•6H₂O | 9.7 | g/L |
| CoCl₂•6H₂O | 0.4 | g/L |
| CuCl₂•2H₂O | 2.7 | g/L |
| ZnCl₂ | 0.2 | g/L |
| Na₂MoO₄•2H₂O | 0.24 | g/L |
| H₃BO₃ | 0.07 | g/L |
| MnCl₂•4H₂O | 0.36 | g/L |

[0474] 1000× Vitamin Mixture:

| Component | Amount (g/L) |
|---|---|
| Thiamine Hydrochloride | 5.0 |
| D-Pantothenic Acid | 5.4 |
| Nicotinic Acid | 6.0 |
| Biotin | 0.06 |

q.s. with DI water to final volume

[0475] To make 1 L M9 minimal media:

[0476] M9 minimal media was made by combining 5×M9 salts, 1M MgSO₄, 20% glucose, 1M CaCl₂ and sterile deionized water. The 5×M9 salts are made by dissolving the following salts in deionized water to a final volume of 1 L: 64 g Na₂HPO₄. 7H₂O, 15 g KH₂PO₄,2.5 g NaCl, 5.0 g NH₄Cl. The salt solution was divided into 200 mL aliquots and sterilized by autoclaving for 15 minutes at 15 psi on the liquid cycle. A 1M solution of MgSO₄ and 1M CaCl₂ were made separately, then sterilized by autoclaving. The glucose was filter sterilized by passing it thought a 0.22 μm filter. All of the components are combined as follows to make 1 L of M9: 750 mL sterile water, 200 mL 5×M9 salts, 2 mL of 1M MgSO₄, 20 mL 20% glucose, 0.1 mL CaCl₂, Q.S. to a final volume of 1 L.

[0477] To make EZ rich media:

[0478] All media components were obtained from TEKnova (Hollister, Calif. USA) and combined in the following volumes. 100 mL 10×MOPS mixture, 10 mL 0.132M K₂ HPO₄, 100 mL 10×ACGU, 200 mL 5× Supplement EX, 10 mL 20% glucose, 580 mL sterile water.

[0479] To make FGN30 Medium:

[0480] FGN30 medium is made of the following components in the concentrations listed:

| | FGN Medium | |
|---|---|---|
| | Final | |
| Chemical | concentration | |
| K2HPO4 | 3.746 | g/L |
| KH2PO4 | 1.156 | g/L |
| NH4Cl | 0.962 | g/L |
| NaCl | 0.702 | g/L |
| Citric Acid | 66 | mg/L |
| FeSO4•7H2O | 16.68 | mg/L |
| ZnCl2 | 0.1 | mg/L |
| MnCl2•4H2O | 0.03 | mg/L |
| CoCl2•6H2O | 0.05 | mg/L |
| CuCl2•2H2O | 0.07 | mg/L |
| NiCl2•6H2O | 0.12 | mg/L |
| Na2MoO4•2H2O | 0.03 | mg/L |
| CrCl3•6H2O | 0.05 | mg/L |
| H3BO3 | 0.3 | mg/L |
| CaCl2 | 11 | mg/L |
| MgSO4 | 240 | mg/L |
| Fructose | 2 | g/L |
| Glycerol | 2 | g/L |

[0481] FGN30 medium can be made according to the following protocol:

[0482] Measure each stock solution in the order as listed below. Mix well after adding each stock solution before adding the next stock solution. Filter and sterilize using a 0.2 μm bottle top vacuum filter.

| Chemical Name | Quantity | |
|---|---|---|
| Water (DI) | 800 | mL |
| 10x Mineral Salts Solution | 100 | mL |
| 1000x Micronutrient stock | 1 | mL |
| solution | | |
| 1M MgSO₄ stock solution | 2 | mL |
| Fructose | 15 | g |
| Glycerol | 15 | g |
| 1M CaCl₂ stock solution | 100 | μL |
| Q.S. using DI water to: | 1000 | mL |

[0483] Preparation of FGN30 Stock Solutions:

[0484] 10× Mineral Salts Solution: Measure each chemical in the order as listed below. Allow each chemical to dissolve completely before adding the next chemical.

| Chemical Name | Quantity | |
|---|---|---|
| Water (DI) | 800 | mL |
| K2HPO4 | 37.46 | g |
| KH2PO4 | 11.56 | g |
| NH4Cl | 9.62 | g |
| NaCl | 7.02 | g |
| Citric Acid, anhydrous | 0.5 | g |
| Q.S. using DI water to: | 1000 | mL |

[0485] 1000× Micronutrient Stock Solution: Measure each chemical in the order as listed below. Allow each chemical to dissolve completely before adding the next chemical.

| Chemical Name | Quantity | |
|---|---|---|
| Water (DI) | 800 | mL |
| Citric Acid anhydrous | 16 | g |
| FeSO4•7H2O | 16.68 | g |
| ZnCl2 | 0.1 | g |
| MnCl2•4H2O | 0.03 | g |
| CoCl2•6H2O | 0.05 | g |
| CuCl2•2H2O | 0.07 | g |
| NiCl2•6H2O | 0.12 | g |
| Na2MoO4•2H2O | 0.03 | g |
| CrCl3•6H2O | 0.05 | g |
| H3BO3 | 0.3 | g |
| Q.S. using DI water to: | 1000 | mL |

[0486] To make FGN30HN Medium:

[0487] FGN30HN medium can be made according to the following protocol: Measure each stock solution in the order as listed below. Mix well after adding each stock solution before adding the next stock solution. Filter sterilize using a 0.2 μm bottle top vacuum filter.

| Chemical Name | Quantity | |
|---|---|---|
| Water (DI) | 800 | mL |
| 10x Mineral Salts Solution | 100 | mL |
| 1000x Micronutrient stock | 1 | mL |
| solution | | |
| 1M MgSO₄ stock solution | 2 | mL |
| Fructose | 15 | g |
| Glycerol | 15 | g |
| 1M CaCl₂ stock solution | 100 | μL |
| Q.S. using DI water to: | 1000 | mL |

[0488] Preparation of FGN30HN Stock solutions:

[0489] 10× High nitrogen Mineral Salts Solution: Measure each chemical in the order as listed below. Allow each chemical to dissolve completely before adding the next chemical.

| Chemical Name | Quantity | |
|---|---|---|
| Water (DI) | 800 | mL |
| K2HPO4 | 7.492 | g |
| KH2PO4 | 2.312 | g |
| NH4Cl | 28.86 | g |
| NaCl | 7.02 | g |
| Citric Acid, anhydrous | 0.5 | g |
| Q.S. using DI water to: | 1000 | mL |

[0490] 1000× Micronutrient Stock Solution: Measure each chemical in the order as listed below. Allow each chemical to dissolve completely before adding the next chemical.

| Chemical Name | Quantity | |
|---|---|---|
| Water (DI) | 800 | mL |
| Citric Acid anhydrous | 16 | g |
| FeSO4•7H2O | 16.68 | g |
| ZnCl2 | 0.1 | g |
| MnCl2•4H2O | 0.03 | g |
| CoCl2•6H2O | 0.05 | g |
| CuCl2•2H2O | 0.07 | g |
| NiCl2•6H2O | 0.12 | g |
| Na2MoO4•2H2O | 0.03 | g |
| CrCl3•6H2O | 0.05 | g |
| H3BO3 | 0.3 | g |
| Q.S. using DI water to: | 1000 | mL |

[0491] To make MSM Medium: MSM medium is made of the following components in the concentrations listed:

| | MSM Medium | |
|---|---|---|
| Chemical | Final concentration | |
| K2HPO4 | 3.746 | g/L |
| KH2PO4 | 1.156 | g/L |
| NH4Cl | 0.962 | g/L |
| NaCl | 0.702 | g/L |
| Citric Acid | 66 | mg/L |
| FeSO4•7H2O | 16.68 | mg/L |
| ZnCl2 | 0.1 | mg/L |
| MnCl2•4H2O | 0.03 | mg/L |
| CoCl2•6H2O | 0.05 | mg/L |
| CuCl2•2H2O | 0.07 | mg/L |
| NiCl2•6H2O | 0.12 | mg/L |
| Na2MoO4•2H2O | 0.03 | mg/L |
| CrCl3•6H2O | 0.05 | mg/L |
| H3BO3 | 0.3 | mg/L |
| CaCl2 | 11 | mg/L |
| MgSO4 | 240 | mg/L |

| | |
|---|---|
| Fructose | NA |
| Glycerol | NA |

[0492] MSM Medium (for chemolithotropic growth of C. necator): Measure each stock solution in the order as listed below. Mix well after adding each stock solution before adding the next stock solution. Filter and sterilize using a 0.2 μm bottle top vacuum filter.

| Chemical Name | Quantity | |
|---|---|---|
| Water (DI) | 650 | mL |
| 1M MOPS pH 7.4 | 150 | mL |
| 10x Mineral Salts Solution with | 100 | mL |
| 3x NH₄Cl and 0.2x PO₄ (HN | | |
| mineral salts) | | |
| 1000x Micronutrient stock | 1 | mL |
| solution | | |
| 1M MgSO₄ stock solution | 2 | mL |
| 1M CaCl₂ stock solution | 100 | μL |
| Q.S. using DI water to: | 1000 | mL |

### Common Method Example 3

### Gel Preparation, DNA Separation, Extraction, Ligation, and Transformation

[0493] Molecular biology grade agarose (RPI Corp., Mt. Prospect, Ill. USA) is added to 1×TAE to make a 1% Agarose in TAE. To obtain 50×TAE add the following to 900 mL distilled H₂O: 242 g Tris base (RPI Corp., Mt. Prospect, Ill. USA), 57.1 mL Glacial Acetic Acid (Sigma-Aldrich, St. Louis, Mo. USA), 18.6 g EDTA (Fisher Scientific, Pittsburgh, Pa. USA), and adjust volume to 1 L with additional distilled water. To obtain 1×TAE, add 20 mL of 50×TAE to 980 mL of distilled water. The agarose-TAE solution is then heated until boiling occurred and the agarose is fully dissolved. The solution is allowed to cool to 50° C. before 10 mg/mL ethidium bromide (Acros Organics, Morris Plains, N.J. USA) is added at a concentration of 5 μL per 100 mL of 1% agarose solution. Once the ethidium bromide is added, the solution is briefly mixed and poured into a gel casting tray with the appropriate number of combs (Idea Scientific Co., Minneapolis, Minn. USA) per sample analysis. DNA samples are then mixed accordingly with 5×TAE loading buffer. 5×TAE loading buffer consists of 5×TAE (diluted from 50×TAE as described herein), 20% glycerol (Acros Organics, Morris Plains, N.J. USA), 0.125% Bromophenol Blue (Alfa Aesar, Ward Hill, Mass. USA), and adjust volume to 50 mL with distilled water. Loaded gels are then run in gel rigs (Idea Scientific Co., Minneapolis, Minn. USA) filled with 1×TAE at a constant voltage of 125 volts for 25-30 minutes. At this point, the gels are removed from the gel boxes with voltage and visualized under a UV transilluminator (FOTODYNE Inc., Hartland, Wis. USA).

[0494] The DNA isolated through gel extraction is then extracted using the QIAquick Gel Extraction Kit following manufacturer's instructions (Qiagen, Valencia, Calif. USA). Similar methods are known to those skilled in the art.

[0495] The thus-extracted DNA then may be ligated into pSMART (Lucigen Corp., Middleton, Wis. USA), StrataClone (Stratagene, La Jolla, Calif. USA) or pCR2.1-TOPO TA (Invitrogen Corp., Carlsbad, Calif. USA) according to manufacturer's instructions.

[0496] Ligation Methods

[0497] For ligations into pSMART vectors:

[0498] Gel extracted DNA is blunted using PCRTerminator (Lucigen Corp., Middleton, Wis. USA) according to manufacturer's instructions. Then 500 ng of DNA is added to 2.5 μL 4× CloneSmart vector premix, 1 μL CloneSmart DNA ligase (Lucigen Corp., Middleton, Wis. USA) and distilled water is added for a total volume of 10 μL. The reaction is then allowed to sit at room temperature for 30 minutes and then heat inactivated at 70° C. for 15 minutes and then placed on ice. E. coli 10G Chemically Competent cells (Lucigen Corp., Middleton, Wis. USA) are thawed for 20 minutes on ice. 40 μL of chemically competent cells are placed into a microcentrifuge tube and 1 μL of heat inactivated CloneSmart Ligation is added to the tube. The whole reaction is stirred briefly with a pipette tip. The ligation and cells are incubated on ice for 30 minutes and then the cells are heat shocked for 45 seconds at 42° C. and then put back onto ice for 2 minutes. 960 μL of room temperature Recovery media (Lucigen Corp., Middleton, Wis. USA) and places into microcentrifuge tubes. Shake tubes at 250 rpm for 1 hour at 37° C. Plate 100 μL of transformed cells on Luria Broth plates (RPI Corp., Mt. Prospect, Ill. USA) plus appropriate antibiotics depending on the pSMART vector used. Incubate plates overnight at 37° C.

[0499] For Litigations into StrataClone:

[0500] Gel extracted DNA is blunted using PCRTerminator (Lucigen Corp., Middleton, Wis. USA) according to manufacturer's instructions. Then 2 μL of DNA is added to 3 μL StrataClone Blunt Cloning buffer and 1 μL StrataClone Blunt vector mix amplkan (Stratagene, La Jolla, Calif. USA) for a total of 6 μL. Mix the reaction by gently pipeting up and down and incubate the reaction at room temperature for 30 minutes then place onto ice. Thaw a tube of StrataClone chemically competent cells (Stratagene, La Jolla, Calif. USA) on ice for 20 minutes. Add 1 μL of the cloning reaction to the tube of chemically competent cells and gently mix with a pipette tip and incubate on ice for 20 minutes. Heat shock the transformation at 42° C. for 45 seconds then put on ice for 2 minutes. Add 250 μL pre-warmed Luria Broth (RPI Corp., Mt. Prospect, Ill. USA) and shake at 250 rpm for 37° C. for 2 hours. Plate 100 μL of the transformation mixture onto Luria Broth plates (RPI Corp., Mt. Prospect, Ill. USA) plus appropriate antibiotics. Incubate plates overnight at 37° C.

[0501] For Ligations into pCR2.1-TOPO TA:

[0502] Add 1 μL TOPO vector, 1 μL Salt Solution (Invitrogen Corp., Carlsbad, Calif. USA) and 3 μL gel extracted DNA into a microcentrifuge tube. Allow the tube to incubate at room temperature for 30 minutes then place the reaction on ice. Thaw one tube of TOP10F chemically competent cells (Invitrogen Corp., Carlsbad, Calif. USA) per reaction. Add 1 μL of reaction mixture into the thawed TOP10F cells and mix gently by swirling the cells with a pipette tip and incubate on ice for 20 minutes. Heat shock the transformation at 42° C. for 45 seconds then put on ice for 2 minutes. Add 250 μL pre-warmed SOC media (Invitrogen Corp., Carlsbad, Calif. USA) and shake at 250 rpm for 37° C. for 1 hour. Plate 100 μL of the transformation mixture onto Luria Broth plates (RPI Corp., Mt. Prospect, Ill. USA) plus appropriate antibiotics. Incubate plates overnight at 37° C.

[0503] General Transformation and Related Culture Methodologies:

[0504] Chemically competent transformation protocols are carried out according to the manufacturer's instructions or according to the literature contained in Molecular Cloning (Sambrook and Russell, 2001). Generally, plasmid DNA or ligation products are chilled on ice for 5 to 30 minutes in solution with chemically competent cells. Chemically competent cells are a widely used product in the field of biotechnology and are available from multiple vendors, such as those indicated in this Subsection. Following the chilling period cells generally are heat-shocked for 30 seconds at 42° C. without shaking, re-chilled and combined with 250 microliters of rich media, such as SOC. Cells are then incubated at 37° C. while shaking at 250 rpm for 1 hour. Finally, the cells are screened for successful transformations by plating on media containing the appropriate antibiotics.

[0505] Alternatively, selected cells may be transformed by electroporation methods such as are known to those skilled in the art.

[0506] The choice of an E. coli host strain for plasmid transformation is determined by considering factors such as plasmid stability, plasmid compatibility, plasmid screening methods and protein expression. Strain backgrounds can be changed by simply purifying plasmid DNA as described herein and transforming the plasmid into a desired or otherwise appropriate E. coli host strain such as determined by experimental necessities, such as any commonly used cloning strain (e.g., DH5α, Top10F′, E. coli 10G, etc.).

[0507] Plasmid DNA was prepared using the commercial miniprep kit from Qiagen (Valencia, Calif. USA) according to manufacturer's instructions.

### Common Method Example 4

### 3-HP Preparation and Analysis

[0508] A 3-HP stock solution was prepared as follows. A vial of β-propiolactone (Sigma-Aldrich, St. Louis, Mo. USA) was opened under a fume hood and the entire bottle contents was transferred to a new container sequentially using a 25-mL glass pipette. The vial was rinsed with 50 mL of HPLC grade water and this rinse was poured into the new container. Two additional rinses were performed and added to the new container. Additional HPLC grade water was added to the new container to reach a ratio of 50 mL water per 5 mL β-propiolactone. The new container was capped tightly and allowed to remain in the fume hood at room temperature for 72 hours. After 72 hours the contents were transferred to centrifuge tubes and centrifuged for 10 minutes at 4,000 rpm. Then the solution was filtered to remove particulates and, as needed, concentrated by use of a rotary evaporator at room temperature. Assay for concentration was conducted, and dilution to make a standard concentration stock solution was made as needed.

[0509] Analytical Methods for 3-HP Detection

[0510] Analysis of Cultures for 3-HP Production: For HPLC analysis of 3-HP, the Waters Chromatography System (Milford, Mass. USA) consisted of the following: 600S Controller, 616 Pump, 717 Plus Autosampler, 486 Tunable UV Detector, and an in-line mobile phase Degasser. In addition, an Eppendorf (Hamburg, Germany) external column heater is used and the data are collected using an SRI (Torrance, Calif. USA) analog-to-digital converter linked to a standard desk top computer. Data are analyzed using the SRI Peak Simple software. A Coregel 64H ion exclusion column (Transgenomic, Inc., San Jose, Calif. USA) is employed. The column resin is a sulfonated polystyrene divinyl benzene with a particle size of 10 μm and column dimensions are 300×7.8 mm. The mobile phase consisted of sulfuric acid (Fisher Scientific, Pittsburgh, Pa. USA) diluted with deionized (18 MΩcm) water to a concentration of 0.02 N and vacuum filtered through a 0.2 μm nylon filter. The flow rate of the mobile phase is 0.6 mL/min. The UV detector is operated at a wavelength of 210 nm and the column is heated to 60° C. The same equipment and method as described herein is used for 3-HP analyses for relevant examples.

[0511] The following method is used for GC-MS analysis of 3-HP. Soluble monomeric 3-HP is quantified using GC-MS after a single extraction of the fermentation media with ethyl acetate. Once the 3-HP has been extracted into the ethyl acetate, the active hydrogens on the 3-HP are replaced with trimethylsilyl groups using N,O-Bis-(Trimethylsilyl) trifluoroacetamide to make the compound volatile for GC analysis. A standard curve of known 3-HP concentrations is prepared at the beginning of the run and a known quantity of ketohexanoic acid (1 g/L) is added to both the standards and the samples to act as an internal standard for Quantitation, with tropic acid as an additional internal standard. The 3-HP content of individual samples is then assayed by examining the ratio of the ketohexanoic acid ion (m/z=247) to the 3-HP ion (219) and compared to the standard curve. 3-HP is quantified using a 3HP standard curve at the beginning of the run and the data are analyzed using HP Chemstation. The GC-MS system consists of a Hewlett Packard model 5890 GC and Hewlett Packard model 5972 MS. The column is Supelco SPB-1 (60 m×0.32 mm×0.25 flm film thickness). The capillary coating is a non-polar methylsilicone. The carrier gas is helium at a flow rate of 1 mL/min. The 3-HP as derivatized is separated from other components in the ethyl acetate extract using either of two similar temperature regimes. In a first temperature gradient regime, the column temperature starts with 40° C. for 1 minute, then is raised at a rate of 10° C./minute to 235° C., and then is raised at a rate of 50° C./minute to 300° C. In a second temperature regime, which was demonstrated to process samples more quickly, the column temperature starts with 70° C. which is held for 1 minute, followed by a ramp-up of 10° C./minute to 235° C. which is followed by a ramp-up of 50° C./minute to 300° C.

[0512] A bioassay for detection of 3-HP also was used in various examples. This determination of 3-HP concentration was carried out based on the activity of the E. coli 3-HP dehydrogenase encoded by the ydfG gene (the YDFG protein). Reactions of 200-μl were carried out in 96-well microtiter plates, and contained 100 mM Tris-HCl, pH 8.8, 2.5 mM MgCl₂, 2.625 mM NADP⁺, 3 μg g purified YDFG and 20 μL culture supernatant. Culture supernatants were prepared by centrifugation in a microfuge (14,000 rpm, 5 min) to remove cells. A standard curve of 3-HP (containing from 0.025 to 2 g/L) was used in parallel reactions to quantitate the amount of 3-HP in culture supernatants. Uninoculated medium was used as the reagent blank. Where necessary, the culture supernatant was diluted in medium to obtain a solution with 3-HP concentrations within that of the standard curve.

[0513] The reactions were incubated at 37° C. for 1 hr, and 20 μL of color developer containing 1.43 mM nitroblue tetrazolium, 0.143 phenazine methosulfate, and 2.4% bovine serum albumin were added to each reaction. Color development was allowed to proceed at 37° C. for an additional hour, and the absorbance at 580 nm was measured. 3-HP concentration in the culture supernatants was quantitated by comparison with the values obtained from the standard curve generated on the same microtiter plate. The results obtained with the enzymatic assay were verified to match those obtained by one of the analytical methods described above.

### Common Method Example 5

### Enzyme Assay Methods for the Quantification of Enzyme Activities

[0514] Pyruvate Dehydrogenase Assay

[0515] Strains to be evaluated were started in 5 ml TB overnights, and 1 ml were diluted into 100 ml SM8 medium and grown at 30° C. for ˜10 hr. The SM8 cultures was harvested in 2×50-ml aliquots by centrifugation and the cell pellet washed into Eppendorf tubes with 1 ml Butterfield's diluent. After recentrifugation, the diluent was removed and the cell pellets stored at −80° C. until lysis. Cell pellets were resuspended with 1 ml 50 mM Tris-HCl, pH 8.0, 25 mM NaCl, 2 mM EDTA, 1 mM DTT, 250 U/ml Benzonase and transferred to a 2-ml screw cap Eppendorf tube half-filled with glass beads. A lysate was prepared by disruption of the cells in the BeadBeater for 90 s, and clarified by centrifugation (13.2 krpm, 5 min, 4° C.). PDH assays were carried out according to the SOP using the supernatant, and protein concentrations in the lysates determined using the Pierce660 reagent. Lysate protein was varied between 0.01 and 0.04 mg total protein per 200 μL reaction, and the specific activity calculated from the slope of the linear curve fitted to the data. The effect of NADH was measured by adding varying amounts of NADH to an assay containing 1 mM NAD+, and monitoring the increase in A340.

[0516] St-Mcr

[0517] Cell line carrying plasmids able to over express malonyl CoA reductases were grown with antibiotic selection in LB media overnight as starter cultures. These overnight starter cultures were used to inoculate either 50 mL to 100 mL expression cultures grown with antibiotic selection in LB media supplemented with 1 mM Isopropylβ-D-1-thiogalactopyranoside (IPTG) to induce protein production. Cultures were grown 24 hr, after which the cells were collected by centrifugation. Cell pellets were lysed using a mixture of Bugbuster, benzonase nuclease, and rLysozyme (all from Novagen). Once lysed, the lysate mixture was centrifuged at 14000 RPM in a standard table top centrifuge. The resulting supernatant was removed to another tube. The clarified supernatant was measure for protein concentration using a Biorad Total Protein determination kit (BioRad). For each measurement, 20 uL of lysate was added to a reaction buffer filled well of the 96-well plate used to perform the assay. All samples were performed in duplicates. The assay was initiated by addition of malonyl CoA to a final concentration of 0.3 mM or 1 mM, which is well above the reported Km binding constant for these enzymes. Once the reaction time course was read and the slopes of each well were calculated, the specific activities were compared to a negative control to determine a background rate. All values reported are the average specific activities measured in triplicate.

[0518] MmsB

[0519] The coupled assay uses lysates overexpressing various dehydrogenases (YdfG, MmsB, and the dehydrogenase domain of Chloroflexus aurantiacus MCR) able to convert malonate semialdehyde formed by the Sulfolobus tokodaii MCR to 3-hydroxypropionate. The formation of 3-hydroxypropionate was assessed using gas chromatography-mass spectrometry (GC-MS). The reactions for these assays were performed as 750 uL reactions containing 20 uL of clarified whole cell lysates from Sulfolobus tokodaii MCR over expressing cultures and 20 uL of clarified whole cell lysates from cells expressing one of three dehydrogenases (ydfG, mmsB, the Chloroflexus aurantiacus). The buffer conditions consisted of 1 mM malonyl CoA, 2 mM NADH or 2 mM NADH, 5 mM dithiothreitol, 3 mM magnesium chloride, 100 mM Trizma-HCl pH7.6 buffer. Lysates for these assays were prepared as follows. Cell line carrying plasmids able to over express ydfG, mmsB, the Chloroflexus aurantiacus dehydrogenase domain, or the Sulfolobus tokodaii malonyl CoA reductases were grown with antibiotic selection in LB media overnight as starter cultures. These overnight starter cultures were used to inoculate either 50 mL to 100 mL expression cultures grown with antibiotic selection in LB media supplemented with 1 mM Isopropylβ-D-1-thiogalactopyranoside (IPTG) to induce protein production. Cultures were grown 24 hr, after which the cells were collected by centrifugation. Cell pellets were lysed using a mixture of Bugbuster, benzonase nuclease, and rLysozyme (all from Novagen). Once lysed, the lysate mixtures were centrifuged at 14000 RPM in a standard table top centrifuge. The resulting supernatants were removed to another tube. Various combination dehydrogenases with and without the Sulfolobus tokodaii malonyl CoA reductases were evaluated. Reactions were incubated at 37 degrees Celsius for 12 to 15 hours. With each assay set, negative control samples for of the proteins overexpressed were included to make sure no lysate had the ability to form 3-hydroxypropionate with a combination of a CoA reductase domain and a dehydrogenase domain. After incubation, all samples were submitted for GS-MS analysis as described elsewhere herein.

[0520] Acetyl-CoA Carboxylase Assay

[0521] Acetyl-CoA carboxylase assay (AccADBC) activities were determined by a coupled enzymatic assay with mcr. Cells were resuspended in ˜1 mL of Lysis/Assay Buffer (50 mM Tris, pH 8.0, 25 mM NaCl, 2 mM EDTA, 2% PEG and 1 mM DTT) containing 250 U/mL Benzonase (EMD Chemicals). Cells were lysed using Bead Beater at ˜75% intensity for ˜1.5 minutes and spin to remove cellular debris. The assay reaction mixture was made as follows: 25 mM Trizma, pH 8.0, 2.5 mM MgCl₂, 1 mM DTT, 15 mM Ammonium Sulfate, 7.5 mM NaHCO₃, 1 mM NADPH, 1 mM ATP, 0.005 mM Biotin, 2% PEG and titrated the cell lysate to a final volume of 200 ul. Reactions were initiated with 1 mM Acetyl CoA and kinetic reads were performed at Abs 340 nm. (Note: for strains which are not overexpressing mcr, the addition of purified mcr is required for the assay to work).

[0522] Glutamate Dehydrogenase Assay

[0523] The reaction was performed in a 96 well plate format with samples for each lysate performed in duplicate. Each reaction was carried out in a 200 uL volume, and the buffer conditions for the assay were 50 mM Trizma buffer pH7.5, 15 mM ammonium chloride, 1 mM NADPH. For lysates, samples of each culture were pelleted and then lysed using a mixture of Bugbuster, benzonase nuclease, and rLysozyme (all from Novagen). To each tech well, 10 microliters of lysate was added. A baseline activity for each well was measured for 10 minutes using a Molecular Dynamics SpectraMax 384 microplate reader with SoftmaxPro software (Molecular Dynamics, Sunnyvale Calif.) to quantitate the rate of change in the 340 nm absorbance. All assays were conducted at 30° C., and the progress of each reaction was monitored for 30 minutes during which measurements were made every 20 seconds. To initiate the glutamate dehydrogenase specific activity, 2-ketoglutarate was added to a 15 mM concentration and again the progress of each reaction was monitored for 30 minutes during which measurements were made every 20 seconds. From these two sets of reading, a rate was calculated by subtracting the baseline rate from the 2-ketoglutarate rate. The specific glutamate dehydrogenase activity was calculated by adjusting the observed rates by the amount of total lysate protein added to each well. The total lysate protein of each prepared lysate was determined using the Pierce 660 nm Protein Assay (Rockville, Ill.).

### Common Method Example 6

### Strain Evaluation Methods for Evaluating 3-HP Production

[0524] Low Phosphate Shake Flask Method

[0525] 3-HP production using production strains was demonstrated at 100-mL scale in SM11 (minimal salts) media without phosphate. Cultures were started from freezer stocks by standard practice (Sambrook and Russell, 2001) into 50 mL of SM11 (minimal salts) media containing 30 mM phosphate plus 35 μg/mL kanamycin and 20 μg/mL chloramphenicol and grown to stationary phase overnight at 30° C. with rotation at 250 rpm. Three mL of this culture were transferred to 100 ml of SM11 No Phosphate media plus 30 g/L glucose, 35 μg/ml kanamycin, and 20 μg/mL chloramphenicol in triplicate 250-ml baffled flasks and incubated at 30° C., 250 rpm. To monitor cell growth by these cultures, samples (2 ml) were withdrawn at designated time points for optical density measurements at 600 nm (OD₆₀₀, 1 cm pathlength). Cultures were shifted to production by transferring the cultures to 37° C. at 6 hours post-inoculation. A sample was collected at this time for analysis of 3HP and enzyme activities. Samples were also collected at 10 and 22 hours post-inoculation for monitoring 3HP production and enzyme activity. To monitor 3HP production by these cultures, samples (10 mL) were withdrawn at the designated time points and pelleted by centrifugation at 12,000 rpm for 10 min and the supernatant collected for analysis of 3-HP production as described elsewhere herein. The pellet was frozen at −80° C. for analysis of enzyme activity as described under elsewhere herein. Dry cell weight (DCW) is calculated as 0.40 times the measured OD₆₀₀ value, based on baseline DCW to OD₆₀₀ determinations. All data are the average of triplicate cultures. For comparison purposes, the specific productivity is calculated from the averaged data at the 24-h time point and expressed as g 3-HP produced per gDCW.

[0526] Syngas Fermentation Method

[0527] 3HP production using syngas feed stocks is demonstrated at 0.6 L scale in SM11 (minimal salts) media. Cultures are started from freezer stocks by standard practice (Sambrook and Russell, 2001) into 49 mL of FGN30 medium supplemented with appropriate antibiotics and incubated at 30° C. for 24 hours with rotation at 250 rpm. 5 mL of this culture is transferred to 45 ml of FGN30HN with appropriate antibiotics and is incubated at 30° C. for 24 hours with rotation at 250 rpm. Columns are setup with appropriate gas flow rates (132 ml/min for 600 ml columns and 20 ml/min for 20 ml columns—70% H₂, 20% O₂, 10% CO₂). Water baths are warmed to 30 C and columns are filled with MSM-HN media with appropriate antibiotics. FGN30HN overnight cultures are diluted to OD600=10-20 and are inoculated into gas-fed columns (60 mL inoculumn into 540 mL of MSM-HN medium for 600 mL cultures and 2 mL into 18 mL MSM-HN for 20 mL cultures). Columns are operated for approximately 72 hours at 30 C and samples are removed for 3-HP quantification.

### Common Method Example 7

### Minimum Inhibitory Concentration Evaluation (MIC) Protocols

[0528] For MIC evaluations, the final results are expressed in chemical agent concentrations determined by analysis of the stock solution by HPLC.

[0529] E. coli Aerobic MIC.

[0530] The (MIC) was determined aerobically in a 96 well-plate format. Plates were setup such that each individual well, when brought to a final volume of 100 uL following inoculation, had the following component levels (corresponding to standard M9 media): 47.7 mM Na₂HPO₄, 22 mM KH2PO4, 8.6 mM NaCl, 18.7 mM NH4Cl, 2 mM MgSO4, 0.1 mM CaCl2, and 0.4% glucose. Overnight cultures of strains were grown in triplicate in 5 mL LB (with antibiotic where appropriate). A 1% (v/v) inoculum was introduced into a 5 ml culture of M9 minimal media. After the cells reached mid-exponential phase, the culture was diluted to an OD600 of about 0.200 (i.e., 0.195-0.205. The cells were further diluted 1:50 and a 10 μL aliquot was used to inoculate each well of a 96 well plate (-104 cells per well) to total volume of 100 uL. The plate was arranged to measure the growth of variable strains or growth conditions in increasing 3-HP concentrations, 0 to 60 g/L, in 5 g/L increments. Plates were incubated for 24 hours at 37 C. The minimum inhibitory 3-HP concentration and maximum 3-HP concentration corresponding to visible cell growth (OD-0.1) was recorded after 24 hours. For cases when MIC>60 g/L, assessments were performed in plates with extended 3-HP concentrations (0-100 g/L, in 5 g/L increments). (OD-0.1) was recorded after 24 hours. For cases when MIC>60 g/L, assessments were performed in plates with extended 3-HP concentrations (0-100 g/L, in 5 g/L increments) E. coli anaerobic. The minimum inhibitory concentration (MIC) was determined anaerobically in a 96 well-plate format. Plates were setup such that each individual well, when brought to a final volume of 100 uL following inoculation, had the following component levels (corresponding to standard M9 media): 47.7 mM Na2HPO4, 22 mM KH2PO4, 8.6 mM NaCl, 18.7 mM NH4Cl, 2 mM MgSO4, 0.1 mM CaCl₂, and 0.4% glucose. Overnight cultures of strains were grown in triplicate in 5 mL LB (with antibiotic where appropriate). A 1% (v/v) inoculum was introduced into a 5 ml culture of M9 minimal media. After the cells reached mid-exponential phase, the culture was diluted to an OD600 of about 0.200 (i.e., 0.195-0.205. The cells were further diluted 1:50 and a 10 μL aliquot was used to inoculate each well of a 96 well plate (-104 cells per well) to total volume of 100 uL. The plate was arranged to measure the growth of variable strains or growth conditions in increasing 3-HP concentrations, 0 to 60 g/L, in 5 g/L increments. Plates were sealed in biobag anaerobic chambers that contained gas generators for anaerobic conditions and incubated for 24 hours at 37 C. The minimum inhibitory 3-HP concentration and maximum 3-HP concentration corresponding to visible cell growth (OD-0.1) was recorded after 24 hours. For cases when MIC>60 g/L, assessments were performed in plates with extended 3-HP concentrations (0-100 g/L, in 5 g/L increments).

[0531] B. subtilis Aerobic MIC

[0532] The minimum inhibitory concentration (MIC) was determined aerobically in a 96 well-plate format. Plates were setup such that each individual well, when brought to a final volume of 100 uL following inoculation, had the following component levels (corresponding to standard M9 media+supplemental glutamate): 47.7 mM Na2HPO4, 22 mM KH2PO4, 8.6 mM NaCl, 18.7 mM NH4Cl, 2 mM MgSO4, 0.1 mM CaCl₂, 10 mM glutamate and 0.4% glucose. Overnight cultures of strains were grown in triplicate in 5 mL LB (with antibiotic where appropriate). A 1% (v/v) inoculum was introduced into a 5 ml culture of M9 minimal media+glutamate. After the cells reached mid-exponential phase, the culture was diluted to an OD₆₀₀ of about 0.200 (i.e., 0.195-0.205. The cells were further diluted 1:50 and a 10 μL aliquot was used to inoculate each well of a 96 well plate (-104 cells per well) to total volume of 100 uL. The plate was arranged to measure the growth of variable strains or growth conditions in increasing 3-HP concentrations, 0 to 60 g/L, in 5 g/L increments. Plates were incubated for 24 hours at 37 C. The minimum inhibitory 3-HP concentration and maximum 3-HP concentration corresponding to visible cell growth (OD-0.1) was recorded after 24 hours. For cases when MIC>60 g/L, assessments were performed in plates with extended 3-HP concentrations (0-100 g/L, in 5 g/L increment).

[0533] C. necator (R. eutropha) Aerobic MIC

[0534] The minimum inhibitory concentration (MIC) was determined aerobically in a 96 well-plate format. Plates were setup such that each individual well, when brought to a final volume of 100 uL following inoculation, had the following component levels (corresponding to FGN media): 21.5 mM K2HPO4, 8.5 mM KH2PO4, 18 mM NH4Cl, 12 mM NaCl, 7.3 uM ZnCl, 0.15 uM MnCl2, 4.85 uM H3B03, 0.21 uM CoCl2, 0.41 uM CuCl2, 0.50 uM NiCl2, 0.12 uM Na2MoO4, 0.19 uM CrCl3, 0.06 mM CaCl2, 0.5 mM MgSO4, 0.06 mM FeSO4, 0.2% glycerol, 0.2% fructose. Overnight cultures of strains were grown in triplicate in 5 mL LB (with antibiotic where appropriate). A 1% (v/v) inoculum was introduced into a 5 ml culture of FGN media. After the cells reached mid-exponential phase, the culture was diluted to an OD600 of about 0.200 (i.e., 0.195-0.205. The cells were further diluted 1:50 and a 10 μL aliquot was used to inoculate each well of a 96 well plate (-104 cells per well) to total volume of 100 uL. The plate was arranged to measure the growth of variable strains or growth conditions in increasing 3-HP concentrations, 0 to 60 g/L, in 5 g/L increments. Plates were incubated for 24 hours at 30 C. The minimum inhibitory 3-HP concentration and maximum 3-HP concentration corresponding to visible cell growth (0D-0.1) was recorded after 24 hours. For cases when MIC>60 g/L, assessments were performed in plates with extended 3-HP concentrations (0-100 g/L, in 5 g/L increments).

### Example 1

### Construction of Plasmids Expressing Malonyl-CoA Reductase (mcr)

[0535] The nucleotide sequence for the malonyl-CoA reductase gene from Chloroflexus aurantiacus was codon-optimized for E. coli according to a service from DNA2.0 (Menlo Park, Calif. USA), a commercial DNA gene synthesis provider. This gene sequence (SEQ ID NO:61) incorporated an EcoRI restriction site before the start codon and was followed by a HindIII restriction site. In addition, a ribosomal binding site was placed in front of the start codon. This gene construct was synthesized by DNA2.0 and provided in a pJ206 vector backbone (SEQ ID NO:62). Plasmid DNA pJ206 containing the synthesized mcr gene was subjected to enzymatic restriction digestion with the enzymes EcoRI and HindIII obtained from New England BioLabs (Ipswich, Mass. USA) according to manufacturer's instructions. The digestion mixture was separated by agarose gel electrophoresis and the appropriate DNA fragment recovered as described in the Common Methods Section. An E. coli cloning strain bearing pKK223-aroH was obtained as a kind gift from the laboratory of Prof. Ryan T. Gill from the University of Colorado at Boulder. Cultures of this strain bearing the plasmid were grown and plasmid DNA prepared as described in the Common Methods Section. Plasmid DNA was digested with the restriction endonucleases EcoRI and HindIII obtained from New England Biolabs (Ipswich, Mass. USA) according to manufacturer's instructions. This digestion served to separate the aroH reading frame from the pKK223 backbone. The digestion mixture was separated by agarose gel electrophoresis, and he agarose gel slice containing the DNA piece corresponding to the backbone of the pKK223 plasmid was recovered as described in the Common Methods Section.

[0536] Purified DNA fragments corresponding to the mcr gene and pK223 vector backbone were ligated and the ligation product was transformed and electroporated according to manufacturer's instructions. The sequence of the resulting vector termed pKK223-mcr was confirmed by routine sequencing performed by a commercial provider (SEQ ID NO:212). pKK223-mcr confers resistance to ampicillin and contains the mcr gene of C. aurantiacus under control of a Piac promoter inducible in E. coli hosts by IPTG.

[0537] To express the mcr gene under the regulation of other promoters besides the Piac on pKK223, the synthetic mcr gene was transferred to other plasmids. Plasmid pTrc-Pfrc-mcr was based on pTrcHisA (Invitrogen, Carlsbad, Calif.; Catalog Number V360-20) and the expression of mcr is directed by the Pfrc IPTG-inducible promoter. The inducer-independent Ptau promoter is based on sequences upstream of the E. coli talA gene. The nucleotide sequence of this promoter, placed immediately upstream of the initiator ATG codon of the synthetic mcr gene, is listed as SEQ ID NO:63.

[0538] The P,AA:mcr construct was incorporated by PCR into a pSC-B vector (Stratagene Corporation, La Jolla, Calif., USA), which was propagated in an E. coli stock, the plasmid DNA purified according to methods described elsewhere herein. The P,AA:mcr region in pSC-B-P,AA:mcr was transferred to a plasmid vector, pSMART-HCamp (Lucigen Corporation, Middleton, Wis., catalog number 40041-2, GenBank AF399742) by PCR using vector primers, M13F and M13R. The fragment generated by PCR was cloned into pSMART-HCamp according to the manufacturer's protocol resulting in plasmid pSMART(HC)Amp-PwA-mcr (SEQ ID NO:64) in which mcr expression does not require induction with IPTG.

### Example 2

### Construction of a Plasmid Expressing Transhydrogenase (pntAB)

[0539] A fusion of the inducer-independent E. coli promoter derived from the tpiA gene (P,p,A) and the pyridine nucleotide transhydrogenase genes, pntAB, (SEQ ID NO:38 and SEQ ID NO:40) was created by amplifying the tpiA promoter region and pntAB region from genomic E. coli K12 DNA by polymerase chain reactions. For the pntAB genes, the region was amplified using the pntAB forward primer GGGAACCATGGCAATTGGCATACCAAG (SEQ ID NO:65), noting that all primers disclosed herein are artificial sequences) containing a Nco1 site that incorporates the initiator Met for the protein sequence of pntA and the pntAB reverse primer GGGTTACAGAGCTTTCAGGATTGCATCC (SEQ ID NO:66). Likewise, the PtpiA region was amplified using the forward primer GGGAACGGCGGGGAAAAACAAACGTT (SEQ ID NO:67) and the reverse primer GGTCCATGGTAATTCTCCACGCTTATAAGC (SEQ ID NO:68) containing a Nco1 restriction site. Polymerase chain reaction products were purified using a PCR purification kit from Qiagen Corporation (Valencia, Calif., USA) using the manufacturer's instructions. Following purification, the products were subjected to enzymatic restriction digestion with the enzyme Nco1. Restriction enzymes were obtained from New England BioLabs (Ipswich, Mass. USA), and used according to manufacturer's instructions. The digestion mixtures were separated by agarose gel electrophoresis, and visualized under UV transillumination as described in the Common Methods Section. Agarose gel slices containing the DNA fragment corresponding to the amplified pntAB gene product and the P,,,,A product were excised from the gel and the DNA recovered with a gel extraction kit from Qiagen used according to manufacturer's instructions. The recovered products were ligated together with T4 DNA ligase (New England BioLabs, Ipswich, Mass. USA) according to manufacturer's instructions.

[0540] Because the ligation reaction can result in several different products, the desired product corresponding to the P,,,,A fragment ligated to the pntAB genes was amplified by polymerase chain reaction and isolated by a second gel purification. For this polymerase chain reaction, the forward primer was GGGAACGGCGGGGAAAAACAAACGTT (SEQ ID NO:67), and the reverse primer was GGGTTACAGAGCTTTCAGGATTGCATCC (SEQ ID NO:66), and the ligation mixture was used as template. The digestion mixtures were separated by agarose gel electrophoresis, and visualized under UV transillumination as described the Common Methods Section. Agarose gel slices containing the DNA piece corresponding to the amplified PJ,iA-pntAB fusion was cut from the gel and the DNA recovered with a standard gel extraction protocol and components from Qiagen according to manufacturer's instructions. This extracted DNA was inserted into a pSC-B vector using the Blunt PCR Cloning kit obtained from Stratagene Corporation (La Jolla, Calif., USA) using the manufacturer's instructions. Colonies were screened by colony polymerase chain reactions. Plasmid DNA from colonies showing inserts of correct size were cultured and miniprepped using a standard miniprep protocol and components from Qiagen according to the manufacturer's instruction. Isolated plasmids were checked by restriction digests and confirmed by sequencing. The sequenced-verified isolated plasmids produced with this procedure were designated pSC-B-P,p,A:pntAB.

[0541] The Pti,,A:pntAB region in pSC-B-P,i,,A:pntAB was transferred to a pBT-3 vector (SEQ ID NO:69) which provides a broad host range origin of replication and a chloramphenicol selection marker. To achieve this construct, a fragment from pBT-3 vector was produced by polymerase chain amplification using the forward primer AACGAATTCAAGCTTGATATC (SEQ ID NO:70), and the reverse primer GAATTCGTTGACGAATTCTCT (SEQ ID NO:71), using pBT-3 as template. The amplified product was subjected to treatment with DpnI to restrict the methylated template DNA, and the mixture was separated by agarose gel electrophoresis, and visualized under UV transillumination as described in the Common Methods Section. The agarose gel slice containing the DNA fragment corresponding to amplified pBT-3 vector product was cut from the gel and the DNA recovered with a standard gel extraction protocol and components from Qiagen according to manufacturer's instructions. The P,p,A:pntAB insert in pSC-B-P,p,A:pntAB was amplified using a polymerase chain reaction with the forward primer GGAAACAGCTATGACCATGATTAC (SEQ ID NO:72) and the reverse primer TTGTAAAACGACGGCCAGTGAGCGCG (SEQ ID NO:73. Both primers were 5′ phosphorylated.

[0542] The PCR product was separated by agarose gel electrophoresis, and visualized under UV transillumination as described in the Common Methods Section. Agarose gel slices containing the DNA fragment corresponding to the amplified Pti,,A:pntAB insert was excised from the gel and the DNA recovered with a standard gel extraction protocol and components from Qiagen according to manufacturer's instructions. This insert DNA was ligated into the pBT-3 vector prepared as described herein with T4 DNA ligase obtained from New England Biolabs (Bedford, Mass., USA), following the manufacturer's instructions. Ligation mixtures were transformed into E. coli 100 cells obtained from Lucigen Corp according to the manufacturer's instructions. Colonies were screened by colony polymerase chain reactions. Plasmid DNA from colonies showing inserts of correct size were cultured and purified using a standard miniprep protocol and components from Qiagen according to the manufacturer's instruction. Isolated plasmids were checked by restriction digests and confirmed by sequencing. The sequenced-verified isolated plasmid produced with this procedure was designated pBT-3-P,i,,A:pntAB (SEQ ID NO:6).

### Example 3A

### Construction of a Plasmid Expressing Acetyl-CoA Carboxylase (accABCD)

[0543] A plasmid carrying two operons able to express the components the acetyl-CoA carboxyltransferase complex from E. coli was constructed by DNA2.0 (Menlo Park, Calif. USA), a commercial DNA gene synthesis provider. This construct incorporated the DNA sequences of the accA and accD genes under control of an inducer-independent promoter derived from the E. coli tpiA gene, and the DNA sequences of the accB and accC genes under control of an inducer-independent promoter derived from the E. coli rpiA genes. Each coding sequence was preceded by a ribosome-binding sequence. The designed operons were provided in a pJ251 vector backbone and was designated pJ251:26385 (SEQ ID NO:74).

[0544] The tpiA promoter of the pJ251:26385 plasmid was altered to provide better expression. This modification was incorporated by amplifying the pJ251:26385 plasmid with the forward primer GCGGGGCAGGAGGAAAAACATG (SEQ ID NO:75) and the reverse primer GCTTATAAGCGAATAAAGGAAGATGGCCGCCCCGCAGGGCAG (SEQ ID NO:76). Each of these primers were synthesized with a 5′ phosphorylation modification. The resulting PCR product was separated by agarose gel electrophoresis, and the appropriate DNA fragment recovered as described in the Common Methods Section. The recovered product was self-ligated with T4 DNA ligase obtained from New England BioLabs (Ipswich, Mass. USA) and digested with Dpn1 according to manufacturer's instructions. Plasmid DNA from colonies showing inserts of correct size were cultured and purified using a standard miniprep protocol and components from Qiagen according to the manufacturer's instruction. Isolated plasmids were checked by restrictions digests and confirmed by sequencing. The sequenced-verified isolated plasmids produced with this procedure were designated pJ251(26385)-P , , , A:accAD-P,,A:accBC (SEQ ID NO:77).

### Example 3B

### Construction of pTrc-PyibD-mcr

[0545] Plasmid maps are shown below. Plasmid 1 was digested with NcoI/Bst1107. A fragment size of 7059 bases was excised from a gel and purified (SEQ ID NO:168). The target promoter sequence was ordered (Integrated DNA Technologies, Coralville, Iowa USA) including with modifications to the native ribosome binding site and subsequently changed to be compatible with existing expression vectors and to accommodate expression of key downstream gene(s) within the vector(s), in this example malonyl CoA reductase (MCR, mcr). Plasmid 2, synthesized by (Integrated DNA Technologies, Coralville, Iowa USA) to comprise this low-phosphate promoter (see discussion above regarding SEQ ID NOs: 210 and 211), was digested with NcoI/PmlI. A fragment size of 156 bases was excised from a gel and purified, this fragment is the pYibD promoter (SEQ ID NO:210). Fragments were ligated overnight using T4 DNA ligase to create Plasmid 3, identified as pTrc-PyibD-mcr (SEQ ID NO:170).

[0546] Plasmid Map 1: Original pTrc-ptrc-MCR

[0547] Plasmid Map 2: pIDTSMART-pYibD promoter. Synthesized by Integrated DNA Technologies.

[0548] Plasmid Map 3: New MCR construct. pTrc-PyibD-mcr (low phosphate induction) (SEQ ID NO:170).

### Example 4

### Construction of Specific Strains that Produce 3-Hydroxypropionic Acid

[0549] According to the respective combinations indicated in the following table, the plasmids described herein w ere introduced into the respective base strains. All plasmids were introduced at the same time via electroporation using standard methods. Transformed cells were grown on the appropriate media with antibiotic supplementation and colonies were selected based on their appropriate growth on the selective media. The mcr expression plasmid pKK223-mcr was transformed into E. coli DF40 (Hfr, garB10, fhuA22, ompF627, fadL701, relAl, pitA10, spoT1, rrnB-2, pgi-2, mcrB1, creC527) or E. coli JP1111 (Hfr, galE45(GalS), LAM-, fabI392(ts, temperature-sensitive), relAl, spoT1, thi-1) as described in the Common Methods Section. As is known in the art, the strains DF40 and JP1111 are generally available E. coli strains, available from sources including the Yale Coli Genetic Stock Collection (New Haven, Conn. USA). Strains carrying multiple compatible plasmids were constructed from these mcr transformants by preparing cells competent for transformation by electroporation as described in the Common Methods Section and transforming with the additional plasmids. Transformants were subsequently selected for on media containing the appropriate combination of antibiotics.

TABLE
Strain names and characteristics

| Strain name | Host | Plasmids |
|---|---|---|
| KX3_0001 | DF40 | pKK223-mcr |
| JX3_0077 | JP1111 | pKK223-mcr |
| JX3_0087 | JP1111 | pkk223-mcr + pBT-3-PtpiA:pntAB |
| JX3_0097 | JP1111 | pkk223-mcr + pJ251(26385)PtpiA:accAD- |
| | | PrpiA:accBC |
| JX3_0098 | JP1111 | pKK223-mcr + |
| | | pJ251(26385)PtpiA:accAD-PrpiA:accBC + |
| | | pBT-3-PtpiA:pntAB |

### Example 5

### Production of 3-Hydroxypropionic Acid

[0550] 3-HP production by KX3_{—}0001 was demonstrated at 100-mL scale in fed-batch (rich) or AM2 (minimal salts) media. Cultures were started from freezer stocks by standard practice (Sambrook and Russell, 2001) into 50 mL of LB media plus 100 μg/mL ampicillin and grown to stationary phase overnight at 37° C. with rotation at 225 rpm. Five ml of this culture were transferred to 100 ml of fed-batch or AM2 media plus 40 g/L glucose, 100 kg/ml ampicillin, 1 mM IPTG in triplicate 250-ml baffled flasks, and incubated at 37° C., 225 rpm. To monitor cell growth and 3-HP production by these cultures, samples (2 ml) were withdrawn at designated time points for optical density measurements at 600 nm (0D600, 1 cm pathlength) and pelleted by centrifugation at 12,000 rpm for 5 min and the supernatant collected for analysis of 3-HP production as described under “Analysis of cultures for 3-HP production” in the Common Methods section. Dry cell weight (DCW) is calculated as 0.33 times the measured OD600 value, based on baseline DCW to OD600 determinations. All data are the average of triplicate cultures. For comparison purposes, the specific productivity is calculated from the averaged data at the 24-h time point and expressed as g 3-HP produced per gDCW. Production of 3-HP by strain KX3_{—}0001 in fed-batch medium is shown in the following table. Under these conditions, the specific productivity after 24 h is 0.0041 g 3-HP per gDCW.

TABLE
Production of 3-HP by KX3_0001 in fed-batch medium

| Time (hr) | 3HP (g/L) | OD600 |
|---|---|---|
| 0 | 0.002 | 0.118 |
| 3 | 0.002 | 0.665 |
| 4 | 0.005 | 1.44 |
| 6 | 0.008 | 2.75 |
| 8 | 0.009 | 3.35 |
| 24 | 0.008 | 5.87 |

### Example 6

### Effect on 3-HP Production of Increased Malonyl-CoA Precursor Pools by Inhibition of Fatty Acid Synthesis

[0551] As described herein, certain chemicals are known to inhibit various enzymes of the fatty acid synthase system, some of which are used as antibiotics given the role of fatty acid synthesis in membrane maintenance and growth, and microorganism growth. Among these inhibitors is cerulenin, which inhibits the KASI ketoacyl-ACP synthase (e.g., fabB in E. coli). To further evaluate approaches to modulate and shift malonyl-CoA utilization in microorganisms that comprise production pathways to a selected chemical product, here 3-HP, wherein malonyl-CoA is a substrate in that pathway, addition of cerulenin during a culture was evaluated.

[0552] Pathways downstream of malonyl-CoA are limited to fatty acid biosynthesis and 3HP production (when a pathway to the latter via malonyl-CoA exists or is provided in a cell). This experiment is designed to determine how to control the use of malonyl-CoA pools in 3HP production strains and further improve the rate of 3HP production. It is hypothesized that by inhibiting fatty acid biosynthesis and regulating malonyl-CoA pools, flux through the pathway will be shifted toward 3HP production. A representative inhibitor has been selected to both interrupt fatty acid elongation and disrupt a futile cycle that recaptures the malonate moiety back to the acetyl-CoA pool. Production by strain KX3_{—}0001 in fed-batch medium in the presence of 10 kg/ml cerulenin is shown in the following table.

[0553] In the presence of the inhibitor, internal pools of the malonyl-CoA precursor are proposed to increase thus leading to increased production of 3-HP. As may be seen by comparison to the results without cerulenin (Example 5), substantially more 3-HP is produced at every time point, and the specific productivity at 24 h is 0.128 g 3-HP per gDCW, a 31-fold increase relative to the results without cerulenin.

TABLE
Production of 3-HP by KX3_0001 in fed-batch
medium and the presence of 10 kg/ml cerulenin

| 3HP (g/L) | OD600 |
|---|---|
| 0.002 | 0.118 |
| 0.002 | 0.724 |
| 0.020 | 1.59 |
| 0.060 | 2.80 |
| 0.090 | 3.45 |
| 0.200 | 4.73 |

### Example 7

### Effect on 3-HP Production of Increased Malonyl-CoA Precursor Pools Using Temperature-Sensitive Fatty Acid Synthesis Mutant

[0554] An alternative approach to increasing internal malonyl-CoA pools is to use genetic mutations rather than chemical inhibitors. While inactivating mutations in the genes encoding fatty acid synthesis functions are usually lethal and thus not obtainable, conditional mutants, such as temperature-sensitive mutants, have been described (de Mendoza, D., and Cronan, J. E., Jr. (1983) Trends Biochem. Sci., 8, 49-52). For example, a temperature-sensitive mutation in the fabI gene, encoding enoyl-ACP reductase, of strain JP1111 (genotype fab1392(ts)) has relatively normal activity at reduced temperature, such as 30 C, and becomes non-permissive, likely through denaturation and inactivation, at elevated temperature, such that when cultured at 37 to 42 C a microorganism only comprising this temperature-sensitive mutant as its enoyl-ACP reductase will produce substantially less fatty acids and phospholipids. This leads to decreased or no growth. However, it was hypothesized that when such mutant is provided in a genetically modified microorganism that also comprises a production pathway, such as to 3-HP, from malonyl-CoA, effective culture methods involving elevating culture temperature can result in increased 3-HP specific productivity.

[0555] Production of 3-HP by strain JX3_{—}0077 in fed-batch medium at a constant temperature of 30° C. and by a culture subjected to a temperature shift from 30° C. to 42° C. is shown in the following Table. The temperature shift is designed to inactivate the enoyl-ACP reductase, hence eliminating the accumulation of fatty acid which in turn increases the internal malonyl-CoA pool. Substantially more 3-HP is produced at every time point, and the specific productivity at 24 h by the temperature-shifted culture is 1.15 g 3-HP per gDCW, a greater than 100-fold increase over the specific productivity of 0.011 g 3-HP per gDCW by the culture maintained constantly at 30° C. This increased productivity of 3-HP by the culture in which the enoyl-ACP reductase is inactivated by elevated temperature supports the view that shifting of malonyl-CoA utilization leads to increased 3-HP production.

TABLE
Production of 3-HP by JX3_0077 in fed-batch medium

| | |
|---|---|
| Constant 30° C. | Shifted to 42° C. |

| Time (hr) | 3HP (g/L) | OD600 | 3HP (g/L) | OD600 |
|---|---|---|---|---|
| 0 | 0 | 0.065 | 0.0007 | 0.068 |
| 3 | 0.003 | 0.273 | 0.004 | 0.25 |
| 4 | 0.010 | 0.409 | 0.037 | 0.79 |
| 6 | 0.030 | 1.09 | 0.096 | 0.91 |
| 8 | 0.016 | 1.81 | 0.193 | 0.81 |
| 24 | 0.014 | 3.8 | 0.331 | 0.87 |

[0556] The following Table shows the 3-HP production by strain JX3_{—}0087 which carried a plasmid overexpressing the transhydrogenase gene in addition to a plasmid carrying the mcr gene. In the culture maintained at a constant temperature of 30° C., a specific productivity of 0.085 g 3-HP per gDCW in 24 h was attained. This is significantly higher than the specific productivity of JX3_{—}0077 which does not carry the overexpressed transhydrogenase gene (above table). The specific productivity of the temperature-shifted culture of JX3_{—}0087 was 1.68 g 3-HP per gDCW, a 20-fold increase over the specific productivity of the culture maintained constantly at 30° C. in which the enoyl-ACP reductase was not inactivated.

TABLE
Production of 3-HP by JX3_0087 in fed-batch medium

| | |
|---|---|
| Constant 30° C. | Shifted to 42° C. |

| Time (hr) | 3HP (g/L) | OD600 | 3HP (g/L) | OD600 |
|---|---|---|---|---|
| 0 | 0 | 0.008 | 0 | 0.004 |
| 3 | 0.0007 | 0.008 | 0.0007 | 0.011 |
| 4 | 0 | 0.04 | 0.002 | 0.063 |
| 6 | 0.0007 | 0.05 | 0.009 | 0.193 |
| 8 | 0.003 | 0.157 | 0.050 | 0.257 |
| 24 | 0.003 | 0.107 | 0.455 | 0.820 |

[0557] The following Table shows the 3-HP production by strain JX3_{—}0097 which carried a plasmid overexpressing genes encoding the acetyl-CoA carboxylase complex in addition to a plasmid carrying the mcr gene. In the culture maintained at a constant temperature of 30° C., a specific productivity of 0.0068 g 3-HP per gDCW in 24 h was attained. This specific productivity is similar to that attained by strain JX3_{—}0077 in which acetyl-CoA carboxylase is not overexpressed. The specific productivity of the temperature-shifted culture of JX3_{—}0097 was 0.29 g 3-HP per gDCW, a 42-fold increase over the specific productivity of the culture maintained constantly at 30° C. in which the enoyl-ACP reductase was not inactivated.

TABLE 13
Production of 3-HP by JX3_0097 in fed-batch medium

| | |
|---|---|
| Constant 30° C.* | Shifted to 42° C.* |

| Time (hr) | 3HP (g/L) | OD600 | 3HP (g/L) | OD600 |
|---|---|---|---|---|
| 0 | | 0.016 | 0 | 0.014 |
| 4 | 0.004 | 0.3 | 0.004 | 0.31 |
| 5 | | 0.36 | 0.006 | 0.59 |
| 6 | | 0.65 | 0.062 | 1.51 |
| 8 | 0.006 | 1.46 | 0.178 | 1.91 |
| 24 | 0.006 | 2.66 | 0.176 | 1.87 |

[0558] Fed-batch medium, a rich medium, may contain components that serve as fatty acid precursors and thus may reduce the demand for malonyl-CoA. Thus the production of 3-HP by the strains derived from JP1111 in AM2, a minimal medium was verified. As shown in Table 14, 3-HP was produced by JX3_{—}0077 in AM2 medium. A specific productivity of 0.024 g 3-HP per gDCW in 24 h was obtained by the culture maintained constantly at 30° C., approximately twice the value obtained in fed-batch medium. The temperature-shifted culture attained a specific productivity of 1.04 g 3-HP per gDCW over 24 h, a 44-fold increase compared to the specific productivity of the culture maintained constantly at 30° C., again indicating that conditional inactivation of the enoyl-ACP reductase increased the internal malonyl-CoA pool and hence increased the 3-HP production, as envisioned by the inventors.

TABLE 14
Production of 3-HP by JX3_0077 in AM2 medium

| | |
|---|---|
| Constant 30° C. | Shifted to 42° C. |

| Time (hr) | 3HP (g/L) | OD600 | 3HP (g/L) | OD600 |
|---|---|---|---|---|
| 0 | 0 | 0.066 | 0 | 0.063 |
| 4 | 0.002 | 0.360 | 0.002 | 0.40 |
| 5 | 0.004 | 0.253 | 0.015 | 0.39 |
| 6 | 0.004 | 0.413 | 0.1 | 0.68 |
| 8 | 0.005 | 0.476 | 0.2 | 0.71 |
| 24 | 0.008 | 1.03 | 0.25 | 0.73 |

[0559] Production of 3-HP in AM2 medium by strain JX3_{—}0087, which carried a plasmid overexpressing the transhydrogenase gene in addition to a plasmid carrying the mcr gene, is shown in Table 15. In the JX3_{—}0087 culture maintained at a constant temperature of 30° C., a specific productivity of 0.018 g 3-HP per gDCW in 24 h was attained. In contrast to results obtained in fed-batch medium, this value is not higher than the specific productivity obtained in AM2 with strain JX3_{—}0077 which does not carry the overexpressed transhydrogenase gene (Table 14). The specific productivity of the temperature-shifted culture of JX3_{—}0087 was 0.50 g 3-HP per gDCW, a 27-fold increase over the specific productivity of the culture maintained constantly at 30° C. in which the enoyl-ACP reductase was not inactivated.

TABLE 15
Production of 3-HP by JX3_0087 in AM2

| | |
|---|---|
| Constant 30° C. | Shifted to 42° C. |

| Time (hr) | 3HP (g/L) | OD600 | 3HP (g/L) | OD600 |
|---|---|---|---|---|
| 0 | 0 | 0.08 | 0 | 0.086 |
| 4 | 0.002 | 0.363 | 0.002 | 0.380 |
| 5 | 0.002 | 0.273 | 0.011 | 0.360 |
| 6 | 0.003 | 0.297 | 0.050 | 0.520 |
| 8 | 0.005 | 0.467 | 0.100 | 0.607 |
| 24 | 0.006 | 1.0 | 0.112 | 0.683 |

[0560] Table 16 shows the 3-HP production in AM2 medium by strain JX3_{—}0097 which carried a plasmid overexpressing genes encoding the acetyl-CoA carboxylase complex in addition to a plasmid carrying the mcr gene. In the culture maintained at a constant temperature of 30° C., a specific productivity of 0.021 g 3-HP per gDCW in 24 h was attained. This specific productivity is similar to that attained by strain JX3_{—}0077 in which acetyl-CoA carboxylase is not overexpressed. The specific productivity of the temperature-shifted culture of JX3_{—}0097 was 0.94 g 3-HP per gDCW in 24 h, a 45-fold increase over the specific productivity of the culture maintained constantly at 30° C. in which the enoyl-ACP reductase was not inactivated.

TABLE 16
Production of 3-HP by JX3_0097.0 in AM2

| | |
|---|---|
| Constant 30° C. | Shifted to 42° C. |

| Time (hr) | 3HP (g/L) | OD600 | 3HP (g/L) | OD600 |
|---|---|---|---|---|
| 0 | 0 | 0.085 | 0.001 | 0.085 |
| 4 | 0.002 | 0.500 | 0.003 | 0.483 |
| 5 | 0.003 | 0.287 | 0.015 | 0.473 |
| 6 | 0.005 | 0.417 | 0.073 | 0.510 |
| 8 | 0.005 | 0.520 | 0.198 | 0.590 |
| 24 | 0.013 | 1.91 | 0.192 | 0.620 |

[0561] The effect of combining the plasmids expressing mcr (malonyl-CoA reductase), pntAB (transhydrogenase), and accABCD (acetyl-CoA carboxylase complex) in the same organism was tested by constructing strain JX3_{—}0098. The Table below shows the production of 3-HP by this strain in AM2 medium. A specific productivity of 0.54 g 3-HP per gDCW in 24 h was obtained in the culture maintained constantly at 30° C., representing a >20-fold increase over strains carrying mcr alone or mcr with either pntAB or accABCD, but not both. Shifting the temperature to inactivate enoyl-ACP reductase resulted in a specific productivity of 2.01 g 3-HP per gDCW in 24 h, a further 3.8-fold increase. Thus the combination of overexpression of pntAB and of accABCD, plus the inactivation of enoyl-ACP reductase via the temperature-sensitive fabr′ allele, resulted in an approximately 500-fold increase in specific productivity of 3-HP by mcr-bearing cells (specific productivity of 2.01 vs. 0.0041 g 3-HP per gDCW in 24 h).

TABLE 17
Production of 3-HP by JX3_0098.0 in AM2 medium

| | |
|---|---|
| Constant 30° C. | Shifted to 42° C. |

| Time (hr) | 3HP (g/L) | OD600 | 3HP (g/L) | OD600 |
|---|---|---|---|---|
| 0 | 0.007 | 0.117 | 0 | 0.13 |
| 4 | 0.013 | 0.303 | 0.017 | 0.47 |
| 5 | 0.017 | 0.600 | 0.060 | 0.75 |
| 6 | 0.033 | 0.730 | 0.107 | 0.87 |
| 8 | 0.053 | 0.9107 | 0.263 | 0.81 |
| 24 | 0.670 | 3.790 | 0.577 | 0.81 |

### Example 8

### Sequence of the Fabits Mutation

[0562] The nature of the exact sequence change in the fabr′ allele carried by strains JP1111 was reconfirmed. Confirmation of this change allows targeted mutagenesis to generate alternative strains with different temperature sensitivities and mutants with stabilities intermediate between wild type and the fabI392 temperature-sensitive allele, allowing growth at a constant temperature higher than 30° C. while providing the benefit of increased internal malonyl-CoA pools. To confirm the DNA sequence of this segment of the chromosome of a wild type (BW25113) and the JP1111 mutant E. coli, chromosomal DNA was prepared from these strains. These DNA were used as templates in a PCR reaction with primers:

SEQ ID NO: 78
FW043 ATGGGTTTTCTTTCCGG
SEQ ID NO: 79
FW047 TTATTTCAGTTCGAGTTCG

[0563] Thermocyler conditions for the PCR were: 95° C., 10 min; 30 cycles of 95° C., 10 s; 47° C. increasing to 58° C., 30 s; 72° C., 1 min; followed by a final incubation at 72° C. for 5 min. The PCR product was separated on an agarose gel and the appropriate sized fragment recovered as described in the Common Methods Section, and sequenced using primers:

SEQ ID NO: 80
FW044 CTATCCATCGCCTACGGTATC
SEQ ID NO: 81
FW045 CGTTGCAATGGCAAAAGC
SEQ ID NO: 82
FW046 CGGCGGTTTCAGCATTGC

[0564] A comparison of the DNA sequence obtained from the fabI392 (SEQ ID NO:28) and wild type strains reveals a single difference between the alleles of C at position 722 of the wild type gene to T, leading to a protein change of Ser at codon 241 to Phe.

[0565] The identification of the affected residue at codon 241 indicates that targeted mutagenesis at this codon, for example to amino acid residues such as Trp, Tyr, His, Ile, or other amino acids other than Ser or Phe, may result in fah./ alleles with different properties than the fabI392 originally isolated in JP1111. Targeted mutagenesis at codons near to codon 241 may also be contemplated to obtain the desired fah./ mutants with altered properties.

### Example 9

### Effect on Volumetric 3-HP Production in 1 L Fermentations, of Increased Malonyl-CoA Precursor Pools Using Temperature Sensitive Fatty Acid Synthesis Mutants

[0566] Four 1 L fed batch fermentation experiments were carried out using the strain JX3_{—}0098. Briefly, seed cultures were started and grown overnight in LB media (Luria Broth) and used to inoculate four 1 L New Brunswick fermentation vessels. The first vessel contained defined AM2 medium at 30° C., IPTG induction was added at 2 mM at an OD600 nm of 2, additional glucose feed was initiated when glucose was depleted to between 1-2 g/L. The temperature was shifted 37° C. over 1 hr at target OD of 10. A high glucose feed rate was maintained at >3 g/L/hr until glucose began to accumulate at concentrations greater than 1 g/L at which time feed rate was varied to maintain residual glucose between 1 and 10 g/L. The second vessel contained defined AM2 medium at 30° C., IPTG induction was added at 2 mM at an OD600 nm of 2, additional glucose feed was initiated when glucose was depleted to 0 g/L. The temperature was shifted 37° C. over 1 hr at target OD of 10. The glucose feed rate was maintained less than or equal to 3 g/L/hr. The third vessel contained rich medium at 30° C., IPTG induction was added at 2 mM at an OD600 nm of 2, additional glucose feed was initiated when glucose was depleted to 1-2 g/L. The temperature was shifted 37° C. over 1 hr at target OD of 10. A high glucose feed rate was maintained at >3 g/L/hr until glucose began to accumulate at concentrations greater than 1 g/L at which time feed rate was varied to maintain residual glucose between 1 and 10 g/L. The fourth vessel contained rich medium at 30° C., IPTG induction was added at 2 mM at an OD600 nm of 2, additional glucose feed was initiated when glucose was depleted to 0 g/L. The temperature was shifted 37° C. over 1 hr at target OD of 10. The glucose feed rate was maintained less than or equal to 3 g/L/hr.

[0567] All fermentation vessels were maintained at pH=7.4 by the controlled addition of 50% v/v ammonium hydroxide (Fisher Scientific). All vessels were maintained at least 20% dissolved oxygen by aeration with sparged filtered air. Samples were taken for optical density measurements as well as HPLC analysis for 3-HP concentration. (Refer to common methods). Maximum volumetric productivities reached 2.99 g/L/hr. In addition, the figures demonstrate the correlation between the 3-4 hour average biomass concentration and 3-4 hr average volumetric productivity rates in these 4 vessels.

### Example 10A

### Production of 3-HP in 250 Liter Fermentations

[0568] Examples of two fed batch fermentations in a 250 liter volume stainless steel fermentor were carried out using the strain BX3_{—}0240, the genotype of which is described elsewhere herein. A two stage seed process was used to generate inoculum for the 250 L fermentor. In the first stage, one ml of glycerol stock of the strain was inoculated into 100 ml of TB medium (Terrific Broth) in a shake flask and incubated at 30° C. until the OD600 was between 3 and 4. In the second stage, 85 ml of the shake flask culture was aseptically transferred to a 14 L New Brunswick fermentor containing 8 L of TB medium and grown at 30° C. and 500 rpm agitation until the OD600 was between 5 and 6. The culture from the 14 L fermentor was used to aseptically inoculate the 250 L volume bioreactor containing defined FM5 medium (see Common Methods Section) at 30° C. so that the post-inoculation volume was 155 L.

[0569] In the first fermentation, induction was effected by adding IPTG to a final concentration of 2 mM at an OD600 of 20. Glucose feed (consisting of a 700 g/L glucose solution) was initiated when the residual glucose in the fermentor was 10-15 g/L. The feed rate was adjusted to maintain the residual glucose between 10 and 15 g/L until about the last 6 hours of the fermentation when the feed rate was reduced so that the residual glucose at harvest was <1 g/L to facilitate 3-HP recovery. Three hours after induction, the temperature was shifted to 37° C. over 1 hour. At the time the temperature shift was initiated, the dissolved oxygen (DO) set point was changed from 20% of air saturation to a point where the DO was maintained between 2-4% of air saturation. The fermentation broth was harvested 48 hours after inoculation. The final broth volume was 169.5 liters.

[0570] The second fermentation was run identically to the first example fermentation described above except for the following differences: induction with IPTG was effected at an OD₆₀₀ of 15, the residual glucose (after the glucose feed was started) ranged between 3-30 g/L, and the fermentation broth was harvested at 38.5 hours after inoculation so that the final residual glucose concentration was 25 g/L. The final broth volume was 167 liters.

[0571] Each fermentation broth was maintained at a pH of approximately 7.4 by the controlled addition of anhydrous ammonia gas. Dissolved oxygen was maintained at the desired levels by aeration with sparged, sterile-filtered air. Samples were taken for optical density measurements as well as HPLC analysis for 3-HP concentration. In the first fermentation, the maximum biomass concentration was 12.0 g dry cell weight/L and the biomass concentration at harvest was 11.4 g dry cell weight/L. The maximum 3-HP titer in this fermentation was 20.7 g/L. In the second fermentation, the maximum biomass concentration was 10.2 g dry cell weight/L and the biomass concentration at harvest was 9.5 g dry cell weight/L. The maximum 3-HP titer in this fermentation was 20.7 g/L.

### Example 10B

### Effect of Growth Medium on 3-HP Production in 1 L Fermentations

[0572] Eight 1 L fed batch fermentation experiments were carried out using the strain BX3_{—}0240. Seed culture was started from 1 ml of glycerol stock of the strain inoculated into 400 ml of TB medium (Terrific Broth) in a shake flask and incubated at 30° C. until the OD600 was between 5 and 6. The shake flask culture was used to aseptically inoculate each 1 L volume bioreactor so that the post-inoculation volume was 653 ml in each vessel.

[0573] Fermentors 1 and 2 contained defined FM3 medium. Fermentors 3-5 contained defined FM4 medium. Fermentors 6-8 contained defined FM5 medium. All media formulations are listed in the Common Methods Section. In each fermentor, the initial temperature was 30° C.

[0574] Induction was effected by adding IPTG to a final concentration of 2 mM at OD600 values of 15-16. Glucose feed (consisting of a 500 g/L glucose solution for FM3 and FM5 media and 500 g/L glucose plus 75 mM MgS04 for FM4) was initiated when the residual glucose in the fermentor was about 10 g/L. The feed rate was adjusted to maintain the residual glucose >3 g/L (the exception was fermentor 8 in which the residual glucose temporarily reached 0.1 g/L before the feed rate was increased). Three hours after induction, the temperature was shifted to 37° C. over 1 hour. At the time the temperature shift was initiated, the dissolved oxygen (DO) set point was changed from 20% of air saturation to 1% of air saturation. The fermentations were stopped 48 hours after inoculation.

[0575] The broth of each fermentor was maintained at a pH of approximately 7.4 by the controlled addition of a pH titrant. The pH titrant for FM3 medium was 5 M NaOH and for FM4 and FM5 it was a 50:50 mixture of concentrated ammonium hydroxide and water. Dissolved oxygen was maintained at the desired levels by sparging with sterile-filtered air. Samples were taken for optical density measurements as well as HPLC analysis for 3-HP concentration. The maximum biomass concentration and the biomass concentration at harvest as well as the maximum 3-HP titer in each fermentor are summarized in the Table 18 below.

TABLE 18

| | | Maximum | Biomass Conc. | Maximum |
|---|---|---|---|---|
| Fermentor | Growth | Biomass | at Harvest | 3HP |
| No. | Medium | Conc. (g DCW/L) | (g DCW/L) | Titer (g/L) |
| 1 | FM3 | 8.7 | 8.7 | 12.3 |
| 2 | FM3 | 9.6 | 9.5 | 16.7 |
| 3 | FM4 | 10.9 | 10.9 | 20.7 |
| 4 | FM4 | 11.5 | 11.5 | 18.3 |
| 5 | FM4 | 11.3 | 11.3 | 22.1 |
| 6 | FM5 | 11.3 | 11.3 | 35.2 |
| 7 | FM5 | 11.2 | 11.0 | 34.0 |
| 8 | FM5 | 11.6 | 10.6 | 31.2 |

### Example 10C

### Effect of Batch Phosphate Concentration on 3-HP Production in 1 L Fermentations

[0576] Four 1 L fed batch fermentation experiments were carried out using the strain BX3_{—}0240. Seed culture was started from 1 ml of glycerol stock of the strain inoculated into 400 ml of TB medium (Terrific Broth) in a shake flask and incubated at 30° C. until the OD600 was between 5 and 7. The shake flask culture was used to aseptically inoculate each 1 L volume bioreactor so that the post-inoculation volume was 653 ml in each vessel.

[0577] All fermentors contained defined FM5 growth medium, but each had different initial concentrations of monobasic and dibasic potassium phosphate. The phosphate concentrations in the batch medium in each fermentor are summarized in the Table 19.

TABLE 19

| Fermentor | K2HPO4 conc. in | KH2PO4 conc. in |
|---|---|---|
| No. | batch medium (g/L) | batch medium (g/L) |
| 1 | 6.1 | 1.92 |
| 2 | 2.63 | 1.38 |
| 3 | 0.87 | 0.14 |
| 4 | 0.043 | 0.070 |

[0578] In each fermentor, the initial temperature was 30° C. Induction was effected by adding IPTG to a final concentration of 2 mM when the OD600 values were at the following values: fermentor 1, 15.3; fermentor 2, 16.0; fermentor 3, 18.1; fermentor 4, 18.4. Glucose feed (consisting of a 500 g/L glucose solution for FM3 and FM5 media and 500 g/L glucose plus 75 mM MgS04 for FM4) was initiated when the residual glucose in the fermentor was about 10 g/L. The feed rate was adjusted to maintain the residual glucose >6.5 g/L. Three hours after induction, the temperature was shifted to 37° C. over 1 hour. At the time the temperature shift was initiated, the dissolved oxygen (DO) set point was changed from 20% of air saturation to 1% of air saturation. The fermentations were stopped 48 hours after inoculation.

[0579] The broth of each fermentor was maintained at a pH of 7.4 by the controlled addition of a 50:50 mixture of concentrated ammonium hydroxide and water. Dissolved oxygen was maintained at the desired levels by sparging with sterile-filtered air. Samples were taken for optical density measurements as well as HPLC analysis for 3-HP concentration. The maximum biomass concentration and the biomass concentration at harvest as well as the maximum 3-HP titer in each fermentor are summarized in the Table 20 below.

TABLE 20

| Fermentor | Maximum Biomass | Biomass Conc. at | Maximum 3HP |
|---|---|---|---|
| No. | Conc. (g DCW/L) | Harvest (g DCW/L) | Titer (g/L) |
| 1 | 9.6 | 8.4 | 23.7 |
| 2 | 11.3 | 11.3 | 27.8 |
| 3 | 14.8 | 12.9 | 39.8 |
| 4 | 12.3 | 10.9 | 44.1 |

### Example 10D

### 3-HP Production in 1 L Fermentations

[0580] Two 1 L fed batch fermentation experiments were carried out using the strain BX3_{—}0240. Seed culture was started from 1 mL of glycerol stock of the strain inoculated into 100 mL of TB medium (Terrific Broth) in a shake flask and incubated at 30° C. until the OD600 was between 5 and 6. The shake flask culture was used to aseptically inoculate (5% volume/volume) each 1 L volume bioreactor so that the post-inoculation volume was 800 mL in each vessel. The fermentors used in this experiment were Das Gip fed-batch pro parallel fermentation system (DASGIP AG, Julich, Germany, model SR07000DLS). The fermentation system included real-time monitoring and control of dissolved oxygen (% D0), pH, temperature, agitation, and feeding. Fermentors 1 and 2 contained defined FM5 medium, made as shown in the Common Methods Section except that Citric Acid was added at 2.0 g/L and MgS04 was added at 0.40 g/L. In each fermentor, the initial temperature was 30° C. Induction was effected by adding IPTG to a final concentration of 2 mM at OD600 values of 17-19, which corresponded to a time post-inoculation of 14.5 hr. Glucose feed (consisting of a 500 g/L glucose solution) was initiated when the residual glucose in the fermentor was about 1 g/L. The feed rate was adjusted to maintain the residual glucose >3 g/L. Three hours after induction, the temperature was shifted to 37° C. over 1 hour. At the time the temperature shift was initiated, the OTR was set to 40 mmol/L-hr by setting airflow and agitation to 1.08 vvm and 1000 rpm respectively. Compressed air at 2 bar was used as the air feed. The broth of each fermentor was maintained at a pH of approximately 7.4 by the controlled addition of a pH titrant. Two hours subsequent to IPTG induction, the pH titrant was changed from 50% NH₄(OH) to 7.4 M NaOH. Samples were taken for optical density measurements as well as HPLC analysis for 3-HP concentration. The maximum biomass concentration and the biomass concentration at harvest as well as the maximum 3-HP titer in each fermentor are summarized in the Table 21 below.

TABLE 21

| | Maximum | Biomass | Total | Yield of |
|---|---|---|---|---|
| | Biomass | Conc. | 3-HP | 3-HP At |
| Fermentor | Conc. | at Harvest | (g) at | (g3-HP/g |
| No. | (g DCW/L) | (g DCW/L) | 69 hrs | glucose) |
| 1 | 10.5 | 8.7 | 49.0 | 0.46 |
| 2 | 10.5 | 8.7 | 47.8 | 0.46 |

[0581] The following Table 22 provides a summary of concentrations of metabolic products obtained in the fermentation broth at the indicated time in hours.

TABLE 22

| | Time | 3-HP | Pyruvate | Succinate | Lactate |
|---|---|---|---|---|---|
| Replicate | (hrs) | (g/L) | (g/L) | (g/L) | (g/L) |
| 1 | 0 | 0 | 0.341 | 0.328 | 0 |
| 1 | 45 | 35.128 | 5.596 | 0 | 0 |
| 1 | 69 | 36.05 | 9.179 | 0 | 0 |
| 2 | 0 | 0 | 0.346 | 0.376 | 0 |
| 2 | 45 | 31.188 | 8.407 | 0 | 0 |
| 2 | 69 | 35.139 | 13.143 | 0 | 0 |

| Fumarate | Glutamate | Glutamine | Glycerol | Alanine |
|---|---|---|---|---|
| (g/L) | (g/L) | (g/L) | (g/L) | (g/L) |
| 0.002 | 0.006 | 0 | 0.563 | 0.139 |
| 0.013 | 0.959 | 0 | 0.160 | 0.104 |
| 0.003 | 1.77 | 0 | 0.244 | 0.075 |
| 0.002 | 0.893 | 0.075 | 0.471 | 0.109 |
| 0.004 | 0.796 | 0 | 0.347 | 0.084 |
| 0.011 | 1.23 | 0 | 0.481 | 0.077 |

### Example 10E

### 3-HP Production in 1 L Fermentations

[0582] Four 1 L fed batch fermentation experiments were carried out using the strain BX3_{—}0240. Seed culture was started from 1 ml of glycerol stock of the strain inoculated into 100 mL of TB medium (Terrific Broth) in a shake flask and incubated at 30° C. until the OD₆₀₀ was between 5 and 6. The shake flask culture was used to aseptically inoculate (5% volume/volume) each 1 L volume bioreactor so that the post-inoculation volume was 800 ml in each vessel. The fermentors used in this experiment were Das Gip fed-batch pro parallel fermentation system (DASGIP AG, Julich, Germany, model SR07000DLS). The fermentation system included real-time monitoring and control of dissolved oxygen (% D0), pH, temperature, agitation, and feeding. All fermentors contained defined FM5 medium, made as shown in the Common Methods Section except that Citric Acid was added at 2.0 g/L and MgS04 was added at 0.40 g/L. In each fermentor, the initial temperature was 30° C. Induction was effected by adding IPTG to a final concentration of 2 mM at OD600 values of 15-19, which corresponded to a time post-inoculation of 15.75 hr. Glucose feed (consisting of a 500 g/L glucose solution) was initiated when the residual glucose in the fermentor was about 3 g/L. The feed rate was adjusted to maintain the residual glucose >3 g/L. Three hours after induction, the temperature was shifted to 37° C. over 1 hour. The broth of each fermentor was maintained at a pH of approximately 7.4 by the controlled addition of a pH titrant 50% NH4(OH). At the time the temperature shift was initiated, the OTR was changed for each fermentor by varying the agitation and airflow according to Table 23. Compressed air at 2 bar was used as the air feed) Samples were taken for optical density measurements as well as HPLC analysis for 3-HP concentration. The maximum biomass concentration and the biomass concentration at harvest as well as the maximum 3-HP titer in each fermentor are summarized in the Table 23 below.

TABLE 23

| | | Agitation | Biomass Conc. | 3HP |
|---|---|---|---|---|
| Fermentor | Airflow | during | at Harvest | Titer (g/L) |
| No. | (vvm) | Production (rpm) | (g DCW/L) | at 37 hrs |
| 1 | 1.08 | 1000 | 8.6 | 14.9 |
| 2 | 1.08 | 800 | 9.0 | 7.9 |
| 3 | 1.08 | 600 | 8.2 | 0.5 |
| 4 | 1.08 | 400 | 5.9 | 0.5 |

### Example 10F

### 3-HP Production in 1.8 L Fermentation

[0583] A 1.8 L fed batch fermentation experiment was carried out using the strain BX3_{—}0240. Seed culture was started from 1 ml of glycerol stock of the strain inoculated into 105 ml of TB medium (Terrific Broth) in a shake flask and incubated at 30° C. until the OD600 was between 5 and 7. 90 ml of the shake flask culture was used to aseptically inoculate 1.71 L of FM5 growth medium, except that the phosphate concentrations were 0.33 g/L K2HPO4 and 0.17 g/L KH2PO4 in batch medium. The other ingredients in the FM5 media formulation are as listed in the Common Methods Section. The initial temperature in the fermentor was 30° C. Induction was effected by adding IPTG to a final concentration of 2 mM when the OD600 value was at 15.46. Glucose feed (consisting of a 500 g/L glucose solution) was initiated when the residual glucose in the fermentor was about 10 g/L. The feed rate was adjusted to maintain the residual glucose >6.5 g/L. Three hours after induction, the temperature was shifted to 37° C. over 1 hour. At the time the temperature shift was initiated, the dissolved oxygen (DO) set point was changed from 20% of air saturation to 1% of air saturation. The broth of each fermentor was maintained at a pH of 7.4 by the controlled addition of a 50:50 mixture of concentrated ammonium hydroxide and water. Dissolved oxygen was maintained at the desired levels by sparging with sterile-filtered air. Samples were taken for optical density measurements as well as HPLC analysis for 3-HP concentration. The maximum final biomass concentration was 9.84 g/L, the maximum 3-HP titer was 48.4 g/L with a final yield from glucose of 0.53 g 3-HP/g glucose.

### Example 11

### Part 1: Strain Construction for Further Evaluations of 3-HP Production

[0584] According to the respective combinations indicated in Table 24 below, the plasmids described herein were introduced into the respective strains. All plasmids were introduced at the same time via electroporation using standard methods. Transformed cells were grown on the appropriate media with antibiotic supplementation and colonies were selected based on their appropriate growth on the selective media. As summarized in Table 24, the mcr expression plasmids pTrc-ptrc-mcr or pACYC(kan)-ptalA-mcr were transformed into two strains derived from E. coli BW25113 (F-, Δ(araD-araB)567, ΔlacZ4787(::rrnB-3), lamba-, rph-1, Δ(rhaD-rhaB)568, hsdR514), these strains comprising additional chromosomal modifications introduced using Gene Bridges technology as described in the Common Methods Section. Strain BX_{—}0590 comprises additional deletions of the ldhA, pflB, mgsA, and poxB genes. Strain BX_{—}0591 comprises the additional deletions of Strain BX_{—}0590 and an additional deletion of the ack_pta genes. Transformants were subsequently selected for on media containing the appropriate combination of antibiotics.

TABLE 24

| Strain name | Host | Plasmids |
|---|---|---|
| BX3_0194 | BX_0590 | PTrc-ptrc-mcr |
| BX3_0195 | BX_0591 | PTrc-ptrc-mcr |
| BX3_0206 | BX_0590 | pACYC(kan)-ptalA-mcr |

### Example 11A

### Construction of Additional Strains for Evaluation

### Part 1: Gene Deletions

[0585] The homologous recombination method using Red/ET recombination, as described elsewhere herein, was employed for gene deletion in E. coli strains. This method is known to those of ordinary skill in the art and described in U.S. Pat. Nos. 6,355,412 and 6,509,156, issued to Stewart et al. and incorporated by reference herein for its teachings of this method. Material and kits for such method are available from Gene Bridges (Gene Bridges GmbH, Heidelberg (formerly Dresden), Germany, <<www.genebridges.com>>), and the method proceeded by following the manufacturer's instructions. The method replaces the target gene by a selectable marker via homologous recombination performed by the recombinase from X-phage. The host organism expressing k-red recombinase is transformed with a linear DNA product coding for a selectable marker flanked by the terminal regions (generally −50 bp, and alternatively up to about −300 bp) homologous with the target gene or promoter sequence. The marker is thereafter removed by another recombination step performed by a plasmid vector carrying the FLP-recombinase, or another recombinase, such as Cre.

[0586] Specific deletions were constructed by amplification using PCR from the Keio strains carrying particular deletions using primers as specified below. The Keio collection was obtained from Open Biosystems (Huntsville, Ala. USA 35806). Individual clones may be purchased from the Yale Genetic Stock Center (New Haven, Conn. USA 06520). These strains each contain a kanamycin marker in place of the deleted gene. In cases where the desired deletion was not in a Keio strain, for example ackA-pta, the deletion was constructed by the above-noted recombination method using the kanamycin resistance marker to replace the deleted sequence, followed by selection of a kanamycin resistance clone having the deletion. The PCR products were introduced into targeted strains using the above-noted recombination method. Combinations of deletions were generated sequentially to obtain strains as described in the following parts of this example.

TABLE 25

| Plasmid | Keio Clone | Gene | Forward Primer | Reverse Primer |
|---|---|---|---|---|
| template | Number | Deletion | SEQ ID NO: | SEQ ID NO: |
| | JW1375 | ldhA | | |
| | JW0886 | pflB | 86 | 99 |
| | JW5129 | mgsA | 87 | 100 |
| | JW0855 | poxB | 88 | 101 |
| | JW2880 | serA | 89 | 102 |
| | JW4364 | arcA | 90 | 103 |
| | JW4356 | trpR | 91 | 104 |
| | JW3561 | aldB | 92 | 105 |
| | JW1412 | aldA | 93 | 106 |
| | JW1293 | puuC | 94 | 107 |
| | JW2755 | relA | 95 | 108 |
| pKD4 | | spoT | 96 | 109 |
| pKD4 | | ackA-pta | 97 | 110 |
| | JW1228 | adhE | 98 | 111 |

### Part 2: Construction of Strains BW_{—}595 and BW_{—}651 Having a fabI Mutation

[0587] The fads mutation (Ser241->Phe) in E. coli strain JP1111 significantly increases the malonyl-CoA concentration when cells are grown at the nonpermissive temperature (37° C.) and thus produces more 3-HP at this temperature. However, JP1111 is not an ideal strain for transitioning into pilot and commercial scale, since it is the product of NTG mutagenesis and thus may harbor unknown mutations, carries mutations in the stringency regulatory factors relA and spoT, and has enhanced conjugation propensity due to the presence of an Hfr factor. Thus the fads mutation was moved into strain BX_{—}591, a strain developed from the well-characterized BW23115 carrying the additional mutations ΔldhA, ΔpflB, ΔmgsA, ΔpoxB, Δpta-ack. These mutations were generated by the sequential application of the gene deletion method described in Part 1 above. The fads gene with 600 by of upstream and downstream DNA sequence was isolated from JP1111 genomic DNA by PCR using primers:

SEQ ID NO: 112
FW056: 5′-CCAGTGGGGAGCTACATTCTC;
and
SEQ ID NO: 113
FW057: 5′-CGTCATTCAGATGCTGGCGCGATC.

[0588] The FRT::kan::FRT cassette was then inserted at a Sma1 site downstream of the fads to generate plasmid pSMART(HC)amp_fabr_FRT::kan::FRT. This plasmid was used as template DNA and the region between primers:

SEQ ID NO: 114
FW043: 5′-ATGGGTTTTCTTTCCGG
and
(SEQ ID NO: 113)
FW057

was amplified in a PCR using KOD HS DNA polymerase (Novagen). The reaction was treated with Dpn1 to fragment the plasmid template and the amplification fragment was gel-purified and recovered using the DNA Clean and Concentrator kit (Zymo Research, Orange, Calif.). Strain BX_{—}591 was transformed with pSIM5 (Datta, S., et al., Gene 379:109-115, 2006) and expression of the lambda red genes carried on this plasmid were induced by incubation at 42° C. for 15 min.

[0589] Electrocompetent cells were made by standard methods. These cells were transformed with the amplification fragment bearing the fabr_FRT::kan::FRT cassette and transformant colonies isolated on LB plates containing 35 jig/ml kanamycin at 30° C. Individual colonies were purified by restreaking, and tested for temperature sensitivity by growth in liquid medium at 30° C. and 42° C. Compared to wildtype parental strain, the strain bearing the fabI allele grows poorly at 42° C. but exhibited comparable growth at 30° C. Correct insertion of the FRT::kan::FRT marker was verified by colony PCR, and the fabr kanR strain was designated BX_{—}594.

[0590] To allow use of the kanR marker on plasmids, the marker incorporated in the chromosome adjacent to fabr was replaced with a DNA fragment encoding resistance to zeocin. The zeoR gene was amplified by PCR from plasmid pJ402 (DNA 2.0, Menlo Park, Calif.) using primers:

HL018:
SEQ ID NO: 115
5′-CAGGTTTGCGGCGTCCAGCGGTTATGTAACTACTATTCGGCGCGACT
TACGCCGCTCCCCGCTCGCGATAATGTGGTAGC;
and
HL019:
SEQ ID NO: 116
5′-AATAAAACCAATGATTTGGCTAATGATCACACAGTCCCAGGCAGTAA
GACCGACGTCATTCTATCATGCCATACCGCGAA.

[0591] The reaction was treated with Dpn1 and gel-purified as above. Strain BX_{—}594 was transformed with pKD46 (Datsenko and Wanner, Proc. Natl. Acad. Sci. USA 96: 6640-6645, 2000) and the lambda red genes carried on this plasmid were induced by the addition of L-arabinose to 1 mM for 2 hr. Electrocompetent cells were made by standard methods (e.g, Sambrook and Russell, 2001). These cells were transformed with the zeoR fragment and transformants selected for on LB plates formulated without NaCl and with 25 μg/ml zeocin. Plates were kept in the dark by wrapping in aluminum foil, and incubated at 30° C. A zeocin-resistant, kanamycin-sensitive strain isolated by this method was designated BX_{—}595. Retention of the fabIts allele was confirmed by growth as above.

[0592] Strain BX_{—}651 was constructed by transferring the fabr-zeoR cassette from BX_{—}595 to strain BW25113 which does not carry mutations in metabolic genes. A DNA fragment carrying this cassette was obtained by PCR using BX_{—}595 chromosomal DNA and primers FW043 (see above) and SEQ ID NO:117 FW65: 5′-GAGATAAGCCTGAAATGTCGC. The PCR product was purified and concentrated using the DNA Clean and Concentrator kit (Zymo Research, Orange, Calif.). Strain BW25113 was transformed with pRedD/ET (Gene Bridges GmBH, Heidelberg, Germany) and the lambda red genes carried on this plasmid were induced by the addition of L-arabinose to 5 mM for 2 hr. Electrocompetent cells were made by standard methods, and transformed with the fabr-zeoR DNA fragment. Transformants were plated as above on zeocin, and clones bearing the temperature-sensitive allele verified by growth at 30° C. and 42° C. as described above.

### Part 3: Promoter Replacement for Selected Genes in Chromosome

[0593] The homologous recombination method described elsewhere herein was employed to replace promoters of various genes. As noted, use of Red/ET recombination is known to those of ordinary skill in the art and described in U.S. Pat. Nos. 6,355,412 and 6,509,156, issued to Stewart et al. and incorporated by reference herein for its teachings of this method. Material and kits for such method are available from Gene Bridges (Gene Bridges GmbH, Heidelberg, Germany, <<www.genebridges.com>>), and the method may proceed by following the manufacturer's instructions. The method involves replacement of the target gene (or, in this case, a promoter region) by a selectable marker via homologous recombination performed by the recombinase from X-phage. The host organism expressing X-red recombinase is transformed with a linear DNA product coding for a selectable marker flanked by the terminal regions (generally −50 bp, and alternatively up to about −300 bp) homologous with the target gene or promoter sequence. The marker can then be removed by another recombination step performed by a plasmid vector carrying the FLP-recombinase, or another recombinase, such as Cre. This method was used according to manufacturer's instructions. Template sequences, each comprising end sequences to achieve the recombination to replace a native promoter for the indicated gene of interest, the desired replacement promoter, and an antibiotic marker sequence, were synthesized by an outside manufacturer (Integrated DNA Technologies, Coralville, Iowa). These sequences are designed to replace the native promoter in front of these genes with a T5 promoter. The T5-aceEF cassette (SEQ ID NO:120) also includes a zeocin resistance cassette flanked by loxP sites. The T5-pntAB (SEQ ID NO:121), T5-udhA (SEQ ID NO:122) and T5-cynTS (SEQ ID NO:123) cassettes each include a blasticidin resistance cassette flanked by loxP sites. Also, T5-cynTS (SEQ ID NO:123) comprises modified loxP sites in accordance with Lambert et al., AEM 73(4) p1126-1135.

[0594] Each cassette first is used as a template for PCR amplification to generate a PCR product using the primers CAGTCCAGTTACGCTGGAGTC (SEQ ID NO:118), and ACTGACCATTTAAATCATACCTGACC (SEQ ID NO:119). This PCR product is used for electroporation (using standard methods such as described elsewhere herein) and recombination into the genome following the Red/ET recombination method of Gene Bridges described above. After transformation positive recombinants are selected on media containing zeocin or blasticidin antibiotics. Curing of the resistance marker is accomplished by expression of the Cre-recombinase according to standard methods. Table 27 shows strains having genotypes that comprise replaced promoters. These are shown as “T5” followed by the affected gene(s).

### Part 4: Construction of Plasmids

[0595] The following table summarizes the construction of plasmids that were used in strains described below. To make the plasmids, a respective gene or gene region of interest was isolated by either PCR amplification and restriction enzyme (RE) digestion or direct restriction enzyme digestion of an appropriate source carrying the gene. The isolated gene was then ligated into the desired vector, transformed into E. coli 10G (Lucigen, Middleton, Wis.) competent cells, screened by restriction mapping and confirmed by DNA sequencing using standard molecular biology procedures (e.g., Sambrook and Russell, 2001).

[0596] It is noted that among these plasmids are those that comprise mono-functional malonyl-CoA reductase activity. Particularly, truncated portions of malonyl-CoA reductase from C. aurantiacus were constructed by use of PCR primers adjacent, respectively, to nucleotide bases encoding amino acid residues 366 and 1220, and 496 and 1220, of the codon-optimized malonyl-CoA reductase from pTRC-ptrc-mcr-amp. Also, a malonyl [symbol] CoA reductase from Erythrobacter sp. was incorporated into another plasmid. As for other plasmids, these were incorporated into strains and evaluated as described below.

TABLE 26

| | | | Cloning | | Plasmid |
|---|---|---|---|---|---|
| Gene(s) or | Vector and | Catalog | Method/Gene(s) | Plasmid | SEQ ID |
| Region Name | *Supplier | Number | Source | Name | NO: |
| Erythrobacter sp | pTRCHisA | V360-20 | RE (Ncol/BgIII)/ | pTrc-ptrc- | 128 |
| MCR | *A | | pUC 57-Eb mcr | Ebmcr-amp | |
| | | | (SEQ ID NO: 905) | | |
| Truncated C. | pTRCHisA | V360-20 | PCR, RE | pTrc-ptrc- | 129 |
| aurantiacus mcr | *A | | (Ncol/HindIII)/ | (366- | |
| (366-1220) | | | pTRC-ptrc mcr- | 1220)mcr- | |
| | | | amp | ptrc-ydfG-kan | |
| Truncated C. | pTRCHisA | V360-20 | PCR, RE | pTrc-ptrc- | 130 |
| aurantiacus mcr | *A | | (Ncol/HindIII)/ | ydfG-ptrc- | |
| (496-1220) | | | pTRC-ptrc mcr- | (496- | |
| | | | amp | 1220)mcr-amp | |
| Mcr | pTRCHisA | V360-20 | PCR, RE | pTrc-ptrc- | 131 |
| | *A | | (Ncol/HindIII)/ | mcr-amp | |
| | | | SEQ ID No. 003 | | |
| Mcr | pTRCHisA | V360-20 | RE (Ahdl, | pTrc-ptrc- | 3 |
| | *A | | blunted) for Kan | mcr-kan | |
| | | | insertion/pTRC- | | |
| | | | ptrc mcr-amp | | |
| mcr/cynTS | pTRCHisA | V360-20 | RE/(Ndel, | pTrc-ptrc- | 132 |
| | *A | | blunted: pTRC | mcr-kan- | |
| | | | ptrc-mcr) | cynTS | |
| | | | kan, (EcoRV: | | |
| | | | pSMARTHC am | | |
| | | | pcynTS) | | |
| AccABCD | pJ251 | N/A | RE (EcoNI, | pJ251-cat- | 2 |
| | *C | | Asel, blunted) | PtpiA- | |
| | | | for Cat | accAD- | |
| | | | insertion/SEQ | PrpiA-accBC | |
| | | | ID No 820 | | |
| PntAB | pACYC184 | E4152S | RE (Nrul, Pcil, | pACYC184- | 133 |
| | cat | | blunted) self- | cat-PtalA- | |
| | *B | | ligate/ | pntAB | |
| | | | pACYC184- | | |
| | | | cat- PtpiA- | | |
| | | | accAD- PrpiA- | | |
| | | | accBCptalA- | | |
| | | | pntAB | | |
| acccABCD/pntAB | pACYC184 | E41525 | RE/( | pACYC184- | 4 |
| | cat | | EcoRV, Aval, | cat-PtpiA- | |
| | *B | | BseB1, blunted: | accAD- | |
| | | | pACYC184), | PrpiA-accBC- | |
| | | | (BamH1, blunted: | ptalA-pntAB | |
| | | | pJ244-pntAB- | | |
| | | | accABCD) | | |
| accABCD/udhA | pACYC184 | E4152S | RE (Swal, Apal)/ | pACYC184- | 5 |
| | cat | | pJ244-pTal-udhA | cat-PtpiA- | |
| | *B | | | accAD- | |
| | | | | PrpiA-accBC- | |
| | | | | ptaIA-udhA | |
| accABCD/T5- | pACYC184 | E4152S | RE (Swal, Ndel)/ | pACYC184- | 134 |
| udhA | cat | | pACYC184-cat- | cat-PtpiA- | |
| | *B | | PtpiA-accAD- | accADPrpiA- | |
| | | | PrpiA-accBC | accBC-T5- | |
| | | | PCR, RE (Pmel, | udhA | |
| | | | Ndel)/BX_00635 | | |
| mcr/serA | pTRCHisA | V360-20 | RE (Pcil, blunted) | pTrc-ptrc- | 135 |
| | *A | | for pTpiA serA | mcr-kan- | |
| | | | insertion/SEQ ID | PtpiA-serA | |
| | | | No. 0047 | | |
| FabF | pTRCHisA | V360-20 | PCR, RE | pTrc-ptrc- | 136 |
| | *A | | (Ncol/Pstl)/ | fabF-amp | |
| | | | E. coli K12 | | |
| | | | genome | | |
| Mcr | pACYC177 | E41515 | PCR (blunt)/ | pACYC177- | 137 |
| | kan | | pTRC-ptrc mcr- | kan-ptrc- | |
| | *B | | amp | mcr | |
| mcr/accABCD | pACYC177 | E41515 | RE/(Swal, | pACYC177- | 138 |
| | kan | | Xbal: pACYC | kan-ptrc- | |
| | *B | | 177 kan ptrc- | mcr-ptPIA | |
| | | | mcr), (Pmel- | accAD- | |
| | | | Xbal: pJ251-cat- | PrpiA-accBC | |
| | | | PtpiA-accAD- | | |
| | | | PrpiA-accBC | | |

*A: Invitrogen, Carlsbad, CA
*B: New England Biolabs, Ipswich, MA
*C: DNA 2.0, Menlo Park

### Part 5: Cloning of pACYC-cat-accABCD-PT5-udhA

[0597] The Pfau promoter driving expression of udhA in pACYC-cat-accABCD-udhA was replaced with the stronger T5 promoter. The genomic PT5—udhA construct from strain BX_{—}00635—was amplified using primer AS1170 (udhA 300 by upstream). See SEQ ID NO:139 for sequence of udhA). PCR fragments of PT5-udhA obtained above were digested with PmeI and NdeI (New England BioLabs, Ipswich, Mass.). Vector pACYC-cat [symbol] accABCD-P,rudhA was similarly digested with SwaI and NdeI (New England BioLabs). The two digested DNA fragments were ligated and transformed to create pACYC-cat-accABCD-PT5-udhA (SEQ ID NO:140). Plasmid digests were used to confirm the correct sequence. This plasmid is incorporated into strains shown in Table 27.

### Part 6: Strain Construction

[0598] Using constructs made by the above methods, strains shown in Table 27, given the indicated Strain Names, were produced providing the genotypes. This is not meant to be limiting, and other strains may be made using these methods and following the teachings provided in this application, including providing different genes and gene regions for tolerance, and/or 3-HP production and modifications to modulate the fatty acid synthase system. Further to the latter, such strains may be produced by chromosomal modifications and/or introduction of non-chromosomal introductions, such as plasmids.

[0599] As to the latter, according to the respective combinations indicated in Table 27 below, the plasmids described above were introduced into the respective strains. All plasmids were introduced at the same time via electroporation using standard methods. Transformed cells were grown on the appropriate media with antibiotic supplementation and colonies were selected based on their appropriate growth on the selective media.

TABLE 27

| Strain Name | Strain Genotype |
|---|---|
| BW25113 | F-, A(araD-araB)567, AlacZ4787(::rrnB-3), LAM-, rph-1, |
| | A(rhaD-rhaB)568, hsdR514 |
| BX 0591 - | F-, A(araD-araB)567, AlacZ4787(::rrnB-3), LAM-, rph-1, |
| | A(rhaD-rhaB)568, hsdR514, AldhA::frt, ApfIB::frt, |
| | AmgsA::frt, ApoxB::frt, Apta-ack::frt |
| 6X_0595 | F-, A(araD-araB)567, AlacZ4787(::rrnB-3), LAM-, rph-1, |
| | A(rhaD-rhaB)568, hsdR514, AldhA::frt, ApfIB::frt, |
| | AmgsA::frt, ApoxB::frt, Apta-ack::frt, fablts (S241F)-zeoR |
| BX_0619 | F-, A(araD-araB)567, AlacZ4787(::rrnB-3), LAM-, rph-1, |
| | A(rhaD-rhaB)568, hsdR514, AldhA::frt, ApfIB::frt, |
| | AmgsA::frt, ApoxB::frt, Apta-ack::frt, fablts |
| | (S241F)-zeoR, T5-pntAB [symbol] BSD |
| BX_0634 | F-, A(araD-araB)567, AlacZ4787(::rrnB-3), LAM-, rph-1, |
| | A(rhaD-rhaB)568, hsdR514, AldhA::frt, ApfIB::frt, |
| | AmgsA::frt, ApoxB::frt, Apta-ack::frt, fablts |
| | (S241F)-zeoR, T5-pntAB, T5-aceEF |
| BX_0635 | F-, A(araD-araB)567, AlacZ4787(::rrnB-3), LAM-, rph-1, |
| | A(rhaD-rhaB)568, hsdR514, AldhA::frt, ApfIB::frt, |
| | AmgsA::frt, ApoxB::frt, Apta-ack::frt, fablts |
| | (S241F)-zeoR, T5-pntAB, T5-aceEF, T5-udhA-BSD |
| 6X_0636 | F-, A(araD-araB)567, AlacZ4787(::rrnB-3), LAM-, rph-1, |
| | A(rhaD-rhaB)568, hsdR514, AldhA::frt, ApfIB::frt, |
| | AmgsA::frt, ApoxB::frt, Apta-ack::frt, fablts |
| | (S241F)-zeoR, T5-aceEF |
| BX_0637 | F-, A(araD-araB)567, AlacZ4787(::rrnB-3), LAM-, rph-1, |
| | A(rhaD-rhaB)568, hsdR514, AldhA::frt, ApfIB::frt, |
| | AmgsA::frt, ApoxB::frt, Apta-ack::frt, fablts |
| | (S241F)-zeoR, T5-aceEF, T5-udhA-BSD |
| BX_0638 | F-, A(araD-araB)567, AlacZ4787(::rrnB-3), LAM-, rph-1, |
| | A(rhaD-rhaB)568, hsdR514, AldhA::frt, ApfIB::frt, |
| | AmgsA::frt, ApoxB::frt, Apta-ack::frt, fablts |
| | (S241F)-zeoR, T5-pntAB, T5-aceEF, AaldB::frt |
| BX_0639 | F-, A(araD-araB)567, AlacZ4787(::rrnB-3), LAM-, rph-1, |
| | A(rhaD-rhaB)568, hsdR514, AldhA::frt, ApfIB::frt, |
| | AmgsA::frt, ApoxB::frt, Apta-ack::frt, fablts |
| | (S241F)-zeoR, T5-pntAB, T5-aceEF, AtrpR::kan |
| BX 0651 - | F-, A(araD-araB)567, AlacZ4787(::rrnB-3), LAM-, rph-1, |
| | A(rhaD-rhaB)568, hsdR514, fablts (S241F)-zeoR |
| BX_0652 | F-, A(araD-araB)567, AlacZ4787(::rrnB-3), LAM-, rph-1, |
| | A(rhaD-rhaB)568, hsdR514, AldhA::frt, ApfIB::frt, |
| | AmgsA::frt, ApoxB::frt, Apta-ack::frt, fablts |
| | (S241F)-zeoR, T5-pntAB, T5-aceEF, T5-udhA, AarcA::kan |
| BX_0653 | F-, A(araD-araB)567, AlacZ4787(::rrnB-3), LAM-, rph-1, |
| | A(rhaD-rhaB)568, hsdR514, AldhA::frt, ApfIB::frt, |
| | AmgsA::frt, ApoxB::frt, Apta-ack::frt, fablts |
| | (S241F)-zeoR, T5-pntAB, T5-aceEF, T5-udhA, |
| | ApuuC::kan |
| BX_0654 | F-, A(araD-araB)567, AlacZ4787(::rrnB-3), LAM-, rph-1, |
| | A(rhaD-rhaB)568, hsdR514, AldhA::frt, ApfIB::frt, |
| | AmgsA::frt, ApoxB::frt, Apta-ack::frt, fablts |
| | (S241F)-zeoR, T5-pntAB, T5-aceEF, T5-udhA, |
| | AaldA::kan |

### Example 11B

### Preparing a Genetically Modified E. coli Host Cell Comprising Malonyl-CoA-Reductase (Mcr) in Combination with Other Genetic Modifications to Increase 3-HP Production Relative to a Control E. coli Cell

[0600] Genetic modifications are made to introduce a vector comprising mmsB such as from Pseudomonas auruginos, which further is codon-optimized for E. coli. Vectors comprising galP and a native or mutated ppc also may be introduced by methods known to those skilled in the art (see, e.g., Sambrook and Russell, Molecular Cloning: A Laboratory Manual, Third Edition 2001 (volumes 1-3), Cold Spring Harbor Laboratory Press, Cold Spring Harbor, N.Y., “Sambrook and Russell, 2001”), additionally recognizing that mutations may be made by a method using the XL1-Red mutator strain, using appropriate materials following a manufacturer's instructions (Stratagene QuikChange Mutagenesis Kit, Stratagene, La Jolla, Calif. USA) and selected for or screened under standard protocols.

[0601] Also, genetic modifications are made to reduce or eliminate the enzymatic activities of E. coli genes as desired. These genetic modifications are achieved by using the RED/ET homologous recombination method with kits supplied by Gene Bridges (Gene Bridges GmbH, Dresden, Germany, <<www.genebridges.com>>) according to manufacturer's instructions.

[0602] Also, in some embodiments genetic modifications are made to increase the NADPH cellular pool. Non-limiting examples of some targets for genetic modification are provided herein. These are pgi (in a mutated form), pntAB, overexpressed, gapA:gapN substitution/replacement, and disrupting or modifying a soluble transhydrogenase such as sthA, and genetic modifications of one or more of zwf, gnd, and edd.

[0603] The so-genetically modified microorganism of any such engineered embodiment is evaluated and found to exhibit higher productivity of 3-HP compared with a control E. coli lacking said genetic modifications. Productivity is measured by standard metrics, such as volumetric productivity (grams of 3-HP/hour) under similar culture conditions.

### Example 11C

### Mutational Development of Selected Polynucleotides

[0604] A selected gene sequence, such as a nucleic acid sequence that encodes for any of SEQ ID NOs: 15 and 42-49, is subjected to a mutation development protocol, starting by constructing a mutant library of a native or previously evolved and/or codon-optimized polynucleotide by use of an error-inducing PCR site-directed mutagenesis method.

[0605] A polynucleotide exhibiting enzymatic activity of the selected gene (which may be any disclosed herein, e.g., an aminotransferase or mmsB) is cloned into an appropriate expression system for E. coli. This sequence may be codon optimized Cloning of a codon-optimized polynucleotide and its adequate expression will be accomplished via gene synthesis supplied from a commercial supplier using standard techniques. The gene will be synthesized with an eight amino acid C-terminal tag to enable affinity based protein purification. Once obtained using standard methodology, the gene will be cloned into an expression system using standard techniques.

[0606] The plasmid containing the above-described polynucleotide will be mutated by standard methods resulting in a large library of mutants (>106). The mutant sequences will be excised from these plasmids and again cloned into an expression vector, generating a final library of greater than 106 clones for subsequent screening. These numbers ensure a greater than 99% probability that the library will contain a mutation in every amino acid encoded by sequence. It is acknowledged that each method of creating a mutational library has its own biases, including transformation into mutator strains of E. coli, error prone PCR, and in addition more site directed muagenesis.

[0607] In some embodiments, various methods may be considered and possibly several explored in parallel. One such method is the use of the XL1-Red mutator strain, which is deficient in several repair mechanisms necessary for accurate DNA replication and generates mutations in plasmids at a rate 5,000 times that of the wild-type mutation rate, may be employed using appropriate materials following a manufacturer's instructions (See Stratagene QuikChange Mutagenesis Kit, Stratagene, La Jolla, Calif. USA). This technique or other techniques known to those skilled in the art, may be employed and then a population of such mutants, e.g., in a library, is evaluated, such as by a screening or selection method, to identify clones having a suitable or favorable mutation.

[0608] With the successful construction of a mutant library, it will be possible to screen this library for increased activity, such as increased malonyl-CoA reductase activity. The screening process will be designed to screen the entire library of greater than 106 mutants. This is done by screening methods suited to the particular enzymatic reaction.

### Example 12A

### Evaluation of 3-HP Production

[0609] 3-HP production by BX3_{—}0194 was demonstrated at 100-mL scale in SM3 (minimal salts) media. Cultures were started from freezer stocks by standard practice (Sambrook and Russell, 2001) into 50 mL of LB media plus 100 μg/mL ampicillin and grown to stationary phase overnight at 37° C. with rotation at 225 rpm. Five ml of this culture were transferred to 100 ml of SM3 media plus 40 g/L glucose, 100 kg/ml ampicillin, and 1 mM IPTG in triplicate 250-ml baffled flasks and incubated at 37° C., 225 rpm. To monitor cell growth and 3-HP production by these cultures, samples (2 ml) were withdrawn at designated time points for optical density measurements at 600 nm (OD600, 1 cm pathlength) and pelleted by centrifugation at 12,000 rpm for 5 min and the supernatant collected for analysis of 3-HP production as described under “Analysis of cultures for 3-HP production” in the Common Methods section. Dry cell weight (DCW) is calculated as 0.33 times the measured OD600 value, based on baseline DCW to OD600 determinations. All data are the average of triplicate cultures. For comparison purposes, the specific productivity is calculated from the averaged data at the 24-h time point and expressed as g 3-HP produced per gDCW. Under these conditions, no 3HP is produced after 24 hours in a culture growing to an OD600 that corresponds to approximately 1.0 g DCW. Production of 3-HP by strain BX3_{—}0194 in SM3 medium is shown in Table 28.

TABLE 28
Production of 3-HP by BX3_0194 in SM3 medium

| Time (hr) | 3HP (gIL) | OD600 |
|---|---|---|
| 4 | 0 | 1.3 |
| 6 | 0 | 2.3 |
| 8 | 0 | 2.8 |
| 24 | 0 | 3.4 |

[0610] Production by strain BX3_{—}0194 in SM3 medium in the presence of 10.1 μg/ml cerulenin is shown in Table 29. In the presence of cerulenin, an inhibitor of the fatty acid synthase system, internal pools of the malonyl-CoA precursor are proposed to increase thus leading to increased production of 3-HP. As may be seen by comparison to the results without cerulenin (Table 28), substantially more 3-HP is produced at every time point. Under these conditions, the specific productivity after 24 hours is 1.3 g 3HP per gDCW.

TABLE 29
Production of 3-HP by BX3_0194 in SM3 medium
and the presence of 10 .1, g/ml cerulenin

| Time (hr) | 3HP (gIL) | OD600 |
|---|---|---|
| 4 | 0.003 | 1.3 |
| 6 | 0.14 | 2.6 |
| 8 | 0.43 | 3.1 |
| 24 | 1.43 | 3.3 |

[0611] 3-HP production by BX3_{—}0195 was demonstrated at 100-mL scale in SM3 (minimal salts) media. Cultures were started from freezer stocks by standard practice (Sambrook and Russell, 2001) into 50 mL of LB media plus 100 μg/mL ampicillin and grown to stationary phase overnight at 37° C. with rotation at 225 rpm. Five ml of this culture were transferred to 100 ml of SM3 media plus 40 g/L glucose, 100.1 μg/ml ampicillin, and 1 mM IPTG in triplicate 250-ml baffled flasks and incubated at 37° C., 225 rpm. To monitor cell growth and 3-HP production by these cultures, samples (2 ml) were withdrawn at designated time points for optical density measurements at 600 nm (OD600, 1 cm pathlength) and pelleted by centrifugation at 12,000 rpm for 5 mM and the supernatant collected for analysis of 3-HP production as described under “Analysis of cultures for 3-HP production” in the Common Methods section. Dry cell weight (DCW) is calculated as 0.33 times the measured OD600 value, based on baseline DCW to OD600 determinations. All data are the average of triplicate cultures. For comparison purposes, the specific productivity is calculated from the averaged data at the 24-h time point and expressed as g 3-HP produced per gDCW. Under these conditions, no 3HP is produced after 24 hours in a culture growing to and OD 600 that corresponds to approximately 1.65 g DCW. Production of 3-HP by strain BX3_{—}0195 in SM3 medium is shown in Table 30.

TABLE 30
Production of 3-HP by BX3 0195 in SM3 medium

| Time (hr) | 3HP (gIL) | OD600 |
|---|---|---|
| 4 | 0 | 0.92 |
| 6 | 0 | 1.35 |
| 8 | 0 | 2.36 |
| 24 | 0 | 5.00 |

[0612] Production by strain BX3_{—}0195 in SM3 medium in the presence of 10 u.g/ml cerulenin is shown in Table 31. In the presence of cerulenin, an inhibitor of the fatty acid synthase system, internal pools of the malonyl-CoA precursor are proposed to increase thus leading to increased production of 3-HP. As may be seen by comparison to the results without cerulenin (Table 30), substantially more 3-HP is produced at every time point. Under these conditions, the specific productivity after 24 hours is 0.54 g 3HP per gDCW.

TABLE 31
Production of 3-HP by BX3_0195 in SM3
medium and the presence of 10 .1, g/ml cerulenin

| Time (hr) | 3HP (gIL) | OD600 |
|---|---|---|
| 4 | 0.003 | 0.97 |
| 6 | 0.07 | 1.57 |
| 8 | 0.31 | 2.36 |
| 24 | 1.17 | 6.59 |

[0613] 3-HP production by BX3_{—}0206 was demonstrated at 100-mL scale in SM3 (minimal salts) media. Cultures were started from freezer stocks by standard practice (Sambrook and Russell, 2001) into 50 mL of LB media plus 35 μg/mL kanamycin and grown to stationary phase overnight at 37° C. with rotation at 225 rpm. Five ml of this culture were transferred to 100 ml of SM3 media plus 40 g/L glucose and 35.1 μg/ml kanamycin in triplicate 250-ml baffled flasks and incubated at 37° C., 225 rpm. To monitor cell growth and 3-HP production by these cultures, samples (2 ml) were withdrawn at designated time points for optical density measurements at 600 nm (0D600, 1 cm pathlength) and pelleted by centrifugation at 12,000 rpm for 5 min and the supernatant collected for analysis of 3-HP production as described under “Analysis of cultures for 3-HP production” in the Common Methods section. Dry cell weight (DCW) is calculated as 0.33 times the measured OD600 value, based on baseline DCW to OD600 determinations. All data are the average of triplicate cultures. For comparison purposes, the specific productivity is calculated from the averaged data at the 24-h time point and expressed as g 3-HP produced per gDCW. Under these conditions, the specific productivity after 24 hours is 0.05 g 3HP per gDCW. Production of 3-HP by strain BX3_{—}0206 in SM3 medium is shown in Table 32.

TABLE 32
Production of 3-HP by BX3_0206 in SM3 medium

| Time (hr) | 3HP (gIL) | OD600 |
|---|---|---|
| 24 | 0.01 | 6.5 |

[0614] Production by strain BX3_{—}0206 in SM3 medium in the presence of 10.1 μg/ml cerulenin is shown in Table 33. In the presence of cerulenin, an inhibitor of the fatty acid synthase system internal pools of the malonyl-CoA precursor are proposed to increase thus leading to increased production of 3-HP. As may be seen by comparison to the results without cerulenin (Table 32), substantially more 3-HP is produced after 24 hours. Under these conditions, the specific productivity after 24 hours is 0.20 g 3HP per gDCW, an approximately 40-fold increase relative to the results without cerulenin.

TABLE 33
Production of 3-HP by BX3_0195 in SM3 medium and the
presence of 10 ug/ml cerulenin

| Time (hr) | 3HP (gIL) | OD600 |
|---|---|---|
| 24 | 0.43 | 6.4 |

### Example 12B

### Evaluation of Strains for 3-HP Production

[0615] 3-HP production in biocatalysts (strains) listed in the following table was demonstrated at 100-mL scale in SM3 (minimal salts) media. SM3 used is described under the Common Methods Section, but was supplemented with 200 mM MOPS. Cultures were started from LB plates containing antibiotics by standard practice (Sambrook and Russell, 2001) into 50 mL of TB media plus the appropriate antibiotic as indicated and grown to stationary phase overnight at 30° C. with rotation at 250 rpm. Five ml of this culture were transferred to 100 ml of SM3 media plus 30 g/L glucose, antibiotic, and 1 mM IPTG (identified as “yes” under the “Induced” column) in triplicate 250-ml baffled flasks and incubated at 30° C., 250 rpm. Flasks were shifted to 37° C., 250 rpm after 4 hours. To monitor cell growth and 3-HP production by these cultures, samples (2 ml) were withdrawn at 24 hours for optical density measurements at 600 nm (OD600, 1 cm pathlength) and pelleted by centrifugation at 14000 rpm for 5 mins and the supernatant collected for analysis of 3-HP production. 3-HP titer and standard deviation is expressed as g/L. Dry cell weight (DCW) is calculated as 0.33 times the measured OD600 value, based on baseline DCW per OD600 determinations. All data are the average of triplicate cultures. For comparison purposes, product to cell ratio is calculated from the averaged data over 24 hours and is expressed as g 3-HP produced per gDCW. The specific productivity is calculated from the cell/product ratio obtained over the 20 hours of production and expressed as g 3-HP produced per gDCW per hour.

TABLE 34

| | | | | Average | | 20 Hour | 24 Hour |
|---|---|---|---|---|---|---|---|
| Strain | Strain | | | 24 Hour | Standard | Specific | Product/Cell |
| Name | Host | Plasmids | Induced | Titer | Deviation | Productivity | Ratio |
| BX3_027 4 | BW2511 3 | 1) pTrc- | yes | <0.001 | 0.000 | <0.001 | <0.001 |
| | | ptrc-mcr- | | | | | |
| | | kan | | | | | |
| BX3_028 2 | BW2511 3 | 1) pTrc-ptrc- | yes | <0.001 | 0.000 | <0.001 | <0.001 |
| | | mcr-kan | | | | | |
| | | 2) pJ251-cat- | | | | | |
| | | PtpiA- | | | | | |
| | | accAD- | | | | | |
| | | PrpiA- | | | | | |
| | | accBC | | | | | |
| BX3_028 3 | BW2511 3 | 1) pTrc-ptrc- | yes | <0.001 | 0.000 | <0.001 | <0.001 |
| | | mcr-kan | | | | | |
| | | 2) pACYC184- | | | | | |
| | | cat- | | | | | |
| | | Pta1A- | | | | | |
| | | pntAB | | | | | |
| BX3_027 5 | BW2511 3 | 1) pTrc-ptrc- | yes | <0.001 | 0.000 | <0.001 | <0.001 |
| | | mcr-kan | | | | | |
| | | 2) pACYC184- | | | | | |
| | | cat [symbol] PtpiA- | | | | | |
| | | accAD- | | | | | |
| | | PrpiA [symbol] accBC- | | | | | |
| | | ptalA- | | | | | |
| | | pntAB | | | | | |
| BX3_028 4 | BW2511 3 | 1) pTrc-ptrc- | yes | <0.001 | 0.000 | <0.001 | <0.001 |
| | | mcr-kan | | | | | |
| | | 2) pACYC184- | | | | | |
| | | cat [symbol] PtpiA- | | | | | |
| | | accAD- | | | | | |
| | | PrpiA [symbol] accBC- | | | | | |
| | | ptalA- | | | | | |
| | | udhA | | | | | |
| BX3_028 5 | BX_005 | 1) pTrc- | yes | <0.001 | 0.000 | <0.001 | <0.001 |
| | 91 | ptrc-mcr- | | | | | |
| | | kan | | | | | |
| BX3_028 6 | BX_005 | 1) pTrc-ptrc- | yes | <0.001 | <0.001 | 0.000 | <0.001 |
| | 91 | mcr-kan 2) | | | | | |
| | | pJ251-cat- | | | | | |
| | | PtpiA- | | | | | |
| | | accAD- | | | | | |
| | | PrpiA- | | | | | |
| | | accBC | | | | | |
| BX3_028 7 | BX_005 | 1) pTrc-ptrc- | yes | <0.001 | 0.000 | <0.001 | <0.001 |
| | 91 | mcr-kan | | | | | |
| | | 2) pACYC184- | | | | | |
| | | cat- | | | | | |
| | | Pta1A- | | | | | |
| | | pntAB | | | | | |
| BX3_028 8 | BX_005 | 1) pTrc-ptrc- | yes | <0.001 | 0.000 | <0.001 | <0.001 |
| | 91 | mcr-kan | | | | | |
| | | 2) pACYC184- | | | | | |
| | | cat [symbol] PtpiA- | | | | | |
| | | accAD- | | | | | |
| | | PrpiA [symbol] accBC- | | | | | |
| | | ptalA- | | | | | |
| | | pntAB | | | | | |
| BX3_028 9 | BX_005 | 1) pTrc-ptrc- | yes | <0.001 | 0.000 | <0.001 | <0.001 |
| | 91 | mcr-kan | | | | | |
| | | 2) pACYC184- | | | | | |
| | | cat [symbol] PtpiA- | | | | | |
| | | accAD- | | | | | |
| | | PrpiA [symbol] accBC- | | | | | |
| | | ptalA- | | | | | |
| | | udhA | | | | | |
| BX3_023 9 | BX_005 | 1) pTrc- | yes | 2.317 | 0.001 | 0.067 | 1.335 |
| | 95 | ptrc-mcr- | | | | | |
| | | kan | | | | | |
| BX3_026 1 | BX_005 | 1) pTrc-ptrc- | yes | 4.576 | 0.327 | 0.187 | 3.748 |
| | 95 | mcr-kan | | | | | |
| | | 2) pJ251-cat- | | | | | |
| | | PtpiA | | | | | |
| | | accAD- | | | | | |
| | | PrpiA- | | | | | |
| | | accBC | | | | | |
| BX3_029 0 | BX_005 | 1) pIrc-ptrc- | yes | 1.706 | 0.396 | 0.060 | 1.194 |
| | 95 | mcr-kan 2) | | | | | |
| | | pACYC184- | | | | | |
| | | cat-Pta1A- | | | | | |
| | | pntAB | | | | | |
| BX3_024 0 | BX_005 | 1) pIrc-ptrc- | yes | 5.878 | 0.684 | 0.228 | 4.563 |
| | 95 | mcr-kan 2) | | | | | |
| | | pACYC184- | | | | | |
| | | cat [symbol] PtpiA- | | | | | |
| | | accAD- | | | | | |
| | | PrpiA [symbol] accBC- | | | | | |
| | | ptalA- | | | | | |
| | | pntAB | | | | | |
| BX3_026 7 | BX_005 | 1) pIrc-ptrc- | yes | 3.440 | 0.205 | 0.160 | 2.912 |
| | 95 | mcr-kan, | | | | | |
| | | 2) pACYC184- | | | | | |
| | | cat-PtpiA- | | | | | |
| | | accAD- | | | | | |
| | | PrpiA- | | | | | |
| | | accBC- | | | | | |
| | | ptalA-udhA | | | | | |
| BX3_025 3 | BX_006 | 1) pIrc-ptrc- | yes | 1.327 | 0.575 | 0.034 | 0.670 |
| | 19 | mcr-kan | | | | | |
| BX3_025 4 | BX_006 | 1) pIrc-ptrc- | yes | 3.131 | 0.058 | 0.136 | 2.711 |
| | 19 | mcr-kan | | | | | |
| | | 2) pJ251-cat- | | | | | |
| | | PtpiA- | | | | | |
| | | accAD- | | | | | |
| | | PrpiA- | | | | | |
| | | accBC | | | | | |
| BX3_026 3 | BX_006 | 1) pIrc-ptrc- | | | | | |
| | 19 | mcr-kan | | | | | |
| 2) | yes | 2.376 | 0.717 | 0.060 | 1.200 | | |
| pACYC184- | | | | | | | |
| cat [symbol] PtpiA- | | | | | | | |
| accAD- | | | | | | | |
| PrpiA [symbol] accBC- | | | | | | | |
| ptalA- | | | | | | | |
| pntAB | | | | | | | |
| BX3_026 8 | BX_006 | 1) pIrc-ptrc- | yes | 5.555 | 0.265 | 0.240 | 4.809 |
| | 19 | mcr-kan 2) | | | | | |
| | | pACYC184- | | | | | |
| | | cat [symbol] PtpiA- | | | | | |
| | | accAD- | | | | | |
| | | PrpiA [symbol] accBC- | | | | | |
| | | ptalA- | | | | | |
| | | udhA | | | | | |
| BX3_027 9 | BX_006 | 1) pIrc-ptrc- | yes | 3.640 | 0.210 | 0.154 | 3.073 |
| | 37 | mcr-kan 2) | | | | | |
| | | pJ251-cat- | | | | | |
| | | PtpiA- | | | | | |
| | | accAD- | | | | | |
| | | PrpiA- | | | | | |
| | | accBC | | | | | |
| BX3_030 3 | BX_006 | 1) pIrc-ptrc- | yes | 2.620 | 0.085 | 0.065 | 1.297 |
| | 37 | mcr-kan 2) | | | | | |
| | | pACYC184- | | | | | |
| | | cat-Pta1A- | | | | | |
| | | pntAB | | | | | |
| BX3_028 1 | BX_006 | 1) pIrc-ptrc- | yes | 4.700 | 0.271 | 0.209 | 4.177 |
| | 37 | mcr-kan 2) | | | | | |
| | | pACYC184- | | | | | |
| | | cat [symbol] PtpiA- | | | | | |
| | | accAD- | | | | | |
| | | PrpiA [symbol] accBC- | | | | | |
| | | ptalA- | | | | | |
| | | pntAB | | | | | |
| BX3_028 0 | BX_006 | 1) pIrc-ptrc- | yes | 4.270 | 0.314 | 0.175 | 3.507 |
| | 37 | mcr-kan 2) | | | | | |
| | | pACYC184- | | | | | |
| | | cat [symbol] PtpiA- | | | | | |
| | | accAD- | | | | | |
| | | PrpiA [symbol] accBC- | | | | | |
| | | ptalA- | | | | | |
| | | udhA | | | | | |
| BX3_027 6 | BX_006 | 1) pIrc-ptrc- | yes | 5.110 | 0.542 | 0.210 | 4.196 |
| | 35 | mcr-kan 2) | | | | | |
| | | pJ251-cat- | | | | | |
| | | PtpiA- | | | | | |
| | | accAD- | | | | | |
| | | PrpiA- | | | | | |
| | | accBC | | | | | |
| BX3_030 4 | BX_006 | 1) pIrc-ptrc- | yes | 2.430 | 0.147 | 0.076 | 1.512 |
| | 35 | mcr-kan 2) | | | | | |
| | | pACYC184- | | | | | |
| | | cat-Pta1A- | | | | | |
| | | pntAB | | | | | |
| BX3_027 8 | BX_006 | 1) pIrc-ptrc- | yes | 0.790 | 0.015 | 0.034 | 0.672 |
| | 35 | mcr-kan 2) | | | | | |
| | | pACYC184- | | | | | |
| | | cat [symbol] PtpiA- | | | | | |
| | | accAD- | | | | | |
| | | PrpiA [symbol] accBC- | | | | | |
| | | ptalA- | | | | | |
| | | pntAB | | | | | |
| BX3_027 7 | BX_006 | 1) pIrc-ptrc- | yes | 6.340 | 0.580 | 0.260 | 5.207 |
| | 35 | mcr-kan 2) | | | | | |
| | | pACYC184- | | | | | |
| | | cat [symbol] PtpiA- | | | | | |
| | | accAD- | | | | | |
| | | PrpiA [symbol] accBC- | | | | | |
| | | ptalA- | | | | | |
| | | udhA | | | | | |
| BX3_029 | BX_006 | 1) pIrc-ptrc- | yes | 3.400 | 0.139 | 0.102 | 2.032 |
| | | mcr-kan | | | | | |
| BX3_029 7 | BX_006 | 1) pIrc-ptrc- | yes | 1.830 | 0.144 | 0.069 | 1.376 |
| | BX 36 | mcr-kan 2) | | | | | |
| | | pJ251-cat- | | | | | |
| | | PtpiA- | | | | | |
| | | accAD- | | | | | |
| | | PrpiA- | | | | | |
| | | accBC | | | | | |
| BX3_029 8 | BX_006 | 1) pIrc-ptrc- | yes | 2.670 | 0.065 | 0.081 | 1.628 |
| | BX 36 | mcr-kan 2) | | | | | |
| | | pACYC184- | | | | | |
| | | cat-PtalA- | | | | | |
| | | pntAB | | | | | |
| BX3_029 9 | BX_006 | 1) pIrc-ptrc- | yes | 3.200 | 0.418 | 0.121 | 2.412 |
| | 36 | mcr-kan 2) | | | | | |
| | | pACYC184- | | | | | |
| | | cat [symbol] PtpiA- | | | | | |
| | | accAD- | | | | | |
| | | PrpiA- | | | | | |
| | | accBC- | | | | | |
| | | pta1A- | | | | | |
| | | pntAB | | | | | |
| BX3_030 0 | BX_006 | 1) pIrc-ptrc- | yes | 4.930 | 0.638 | 0.184 | 3.671 |
| | 36 | mcr-kan 2) | | | | | |
| | | pACYC184- | | | | | |
| | | cat [symbol] PtpiA- | | | | | |
| | | accAD- | | | | | |
| | | PrpiA- | | | | | |
| | | accBC- | | | | | |
| | | pta1A-udhA | | | | | |
| BX3_029 1 | BX_006 | 1) pIrc-ptrc- | yes | 1.330 | 0.138 | 0.039 | 0.783 |
| | 34 | mcr-kan | | | | | |
| BX3_029 2 | BX_006 | 1) pIrc-ptrc- | yes | 1.209 | 0.087 | 0.030 | 0.599 |
| | 34 | mcr-kan 2) | | | | | |
| | | pJ251-cat- | | | | | |
| | | PtpiA- | | | | | |
| | | accAD- | | | | | |
| | | PrpiA- | | | | | |
| | | accBC | | | | | |
| BX3_029 3 | BX_006 | 1) pIrc-ptrc- | yes | 0.269 | 0.035 | 0.006 | 0.124 |
| | 34 | mcr-kan 2) | | | | | |
| | | pACYC184- | | | | | |
| | | cat-PtalA- | | | | | |
| | | pntAB | | | | | |
| BX3_029 4 | BX_006 | 1) pIrc-ptrc- | yes | 1.588 | 0.136 | 0.046 | 0.927 |
| | 34 | mcr-kan 2) | | | | | |
| | | pACYC184- | | | | | |
| | | cat [symbol] PtpiA- | | | | | |
| | | accAD- | | | | | |
| | | PrpiA- | | | | | |
| | | accBC- | | | | | |
| | | pta1A- | | | | | |
| | | pntAB | | | | | |
| BX3_029 5 | BX_006 | 1) pIrc-ptrc- | yes | 1.054 | 0.048 | 0.028 | 0.552 |
| | 34 | mcr-kan 2) | | | | | |
| | | pACYC184- | | | | | |
| | | cat [symbol] PtpiA- | | | | | |
| | | accAD- | | | | | |
| | | PrpiA- | | | | | |
| | | accBC- | | | | | |
| | | pta1A-udhA | | | | | |
| BX3_030 2 | BX_006 | 1) pIrc-ptrc- | yes | 3.710 | 0.221 | 0.118 | 2.352 |
| | 37 | mcr-kan | | | | | |
| BX3_030 1 | BX_006 | 1) pIrc-ptrc- | yes | 3.150 | 0.576 | 0.101 | 2.027 |
| | 35 | mcr-kan | | | | | |
| BX3 030 5 | BW2511 3 | 1) pIrc-ptrc- | yes | 0.006 | 0.006 | 0.000 | 0.003 |
| | | mcr-kan- | | | | | |
| | | cynTS 2) | | | | | |
| | | pACYC184- | | | | | |
| | | cat-PtpiA- | | | | | |
| | | accAD- | | | | | |
| | | PrpiA- | | | | | |
| | | accBC- | | | | | |
| | | ptalA- | | | | | |
| | | pntAB | | | | | |
| BX3 030 6 | BX 005 91 | 1) pIrc-ptrc- | yes | 0.035 | 0.035 | 0.001 | 0.014 |
| | | mcr-kan- | | | | | |
| | | cynTS 2) | | | | | |
| | | pACYC184- | | | | | |
| | | cat-PtpiA- | | | | | |
| | | accAD- | | | | | |
| | | PrpiA- | | | | | |
| | | accBC- | | | | | |
| | | ptalA- | | | | | |
| | | pntAB | | | | | |
| BX3_025 8 | BX 005 9-5 | 1) pIrc-ptrc- | yes | 1.190 | 0.046 | 0.039 | 0.771 |
| | | mcr-kan- | | | | | |
| | | cynTS 2) | | | | | |
| | | pACYC184- | | | | | |
| | | cat-PtpiA- | | | | | |
| | | accAD- | | | | | |
| | | PrpiA- | | | | | |
| | | accBC- | | | | | |
| | | ptalA- | | | | | |
| | | pntAB | | | | | |
| BX3_030 8 | BX_006 | 1) pIrc-ptrc- | yes | 0.401 | 0.006 | 0.011 | 0.211 |
| | 34 | mcr-kan- | | | | | |
| | | cynTS 2) | | | | | |
| | | pACYC184- | | | | | |
| | | cat-PtpiA- | | | | | |
| | | accAD- | | | | | |
| | | PrpiA | | | | | |
| | | accBC- | | | | | |
| | | ptalA-udhA | | | | | |
| BX3 031 0 | BX_006 | 1) pIrc-ptrc- | yes | 1.450 | 0.072 | 0.045 | 0.897 |
| | 37 | mcr-kan- | | | | | |
| | | cynTS | | | | | |
| | | 2) pACYC184- | | | | | |
| | | cat- | | | | | |
| | | PtpiA- | | | | | |
| | | accAD- | | | | | |
| | | PrpiA- | | | | | |
| | | accBC- | | | | | |
| | | ptalA-udhA | | | | | |
| BX3 030 9 | BX_006 | 1) pIrc-ptrc- | yes | 4.079 | 0.054 | 0.155 | 3.098 |
| | 35 | mcr-kan- | | | | | |
| | | cynTS 2) | | | | | |
| | | pACYC184- | | | | | |
| | | cat-PtpiA- | | | | | |
| | | accAD- | | | | | |
| | | PrpiA- | | | | | |
| | | accBC- | | | | | |
| | | ptalA-udhA | | | | | |
| BX3_031 1 | BX_006 | 1) pIrc-ptrc- | yes | 3.040 | 0.227 | 0.119 | 2.387 |
| | 38 | mcr-kan 2) | | | | | |
| | | pACYC184- | | | | | |
| | | cat [symbol] PtpiA- | | | | | |
| | | accAD- | | | | | |
| | | PrpiA [symbol] accBC- | | | | | |
| | | ptalA- | | | | | |
| | | udhA | | | | | |
| BX3_031 2 | BX_006 | 1) pIrc-ptrc- | yes | 2.850 | 0.071 | 0.152 | 3.030 |
| | 39 | mcr-amp 2) | | | | | |
| | | pACYC184- | | | | | |
| | | cat [symbol] PtpiA- | | | | | |
| | | accAD- | | | | | |
| | | PrpiA [symbol] accBC- | | | | | |
| | | ptalA- | | | | | |
| | | udhA | | | | | |
| BX3_035 2 | BX_065 1 | 1) pIrc-ptrc- | yes | <0.001 | 0.000 | <0.001 | NA |
| | | mcr-kan | | | | | |
| BX3_035 3 | BX_065 1 | 1) pIrc-ptrc- | yes | <0.001 | 0.000 | <0.001 | NA |
| | | mcr-kan 2) | | | | | |
| | | pJ251-cat- | | | | | |
| | | PtpiA- | | | | | |
| | | accAD- | | | | | |
| | | PrpiA- | | | | | |
| | | accBC | | | | | |
| BX3_031 3 | BX_006 | 1) | no | 0.037 | 0.009 | 0.001 | 0.027 |
| | 35 | pACYC177- | | | | | |
| | | kan-ptrc- | | | | | |
| | | mcr | | | | | |
| BX3_031 3 | BX_006 | 1) | yes | 0.031 | 0.009 | 0.001 | 0.023 |
| | 35 | pACYC177- | | | | | |
| | | kan-ptrc- | | | | | |
| | | mcr | | | | | |
| BX3 033 5 | BX | 1) | no | 0.037 | 0.021 | 0.001 | 0.020 |
| | BX_006 | pACYC177- | | | | | |
| | 35 | kan-ptrc- | | | | | |
| | | mcr-PtpiA- | | | | | |
| | | accAD- | | | | | |
| | | PrpiA- | | | | | |
| | | accBC | | | | | |
| BX3 033 5 | BX_006 | 1) | yes | 0.037 | 0.021 | 0.001 | 0.020 |
| | BX 35 | pACYC177- | | | | | |
| | | kan-ptrc- | | | | | |
| | | mcr-PtpiA- | | | | | |
| | | accAD- | | | | | |
| | | PrpiA- | | | | | |
| | | accBC | | | | | |
| BX3_034 9 | BX_005 | 1) pIrc-ptrc- | yes | 0.057 | 0.006 | 0.001 | 0.025 |
| | 91 | (366- | | | | | |
| | | 1220) mcr- | | | | | |
| | | ptrc-ydfG- | | | | | |
| | | kan | | | | | |
| BX3_035 0 | BX_005 | 1) pIrc-ptrc- | yes | 1.163 | 0.045 | 0.023 | 0.457 |
| | 95 | (366- | | | | | |
| | | 1220) mcr- | | | | | |
| | | ptrc-ydfG- | | | | | |
| | | kan | | | | | |
| BX3_035 1 | BX_006 | 1) pTrc- | yes | 0.658 | 0.060 | 0.020 | 0.390 |
| | 35 | ptrc-(366- | | | | | |
| | | 1220) mcr- | | | | | |
| | | ptrc-ydfG- | | | | | |
| | | kan 2) | | | | | |
| | | pACYC184- | | | | | |
| | | cat-PtpiA- | | | | | |
| | | accAD- | | | | | |
| | | PrpiA- | | | | | |
| | | accBC- | | | | | |
| | | pta1A-udhA | | | | | |
| BX3_035 8 | BX_005 | 1) pIrc-ptrc- | yes | 0.040 | 0.000 | 0.001 | 0.015 |
| | 91 | ydfG-ptrc- | | | | | |
| | | (496- | | | | | |
| | | 1220) mcr- | | | | | |
| | | amp | | | | | |
| BX3_036 0 | BX_006 | 1) pTrc- | yes | 4.027 | 0.185 | 0.138 | 2.761 |
| | 35 | ptrc-ydfG- | | | | | |
| | | ptrc-(496- | | | | | |
| | | 1220) mcr- | | | | | |
| | | amp 2) | | | | | |
| | | pACYC184- | | | | | |
| | | cat-PtpiA- | | | | | |
| | | accAD- | | | | | |
| | | PrpiA- | | | | | |
| | | accBC- | | | | | |
| | | ptalA-udhA | | | | | |
| BX3_031 | BX_006 | 1) pIrc-ptrc- | yes | 1.170 | 0.118 | 0.055 | 1.101 |
| | | mcr-kan- | | | | | |
| 4 | 35 | PtpiA-serA | | | | | |
| | | 2) | | | | | |
| | | pACYC184- | | | | | |
| | | cat-PtpiA- | | | | | |
| | | accAD- | | | | | |
| | | PrpiA- | | | | | |
| | | accBC- | | | | | |
| | | ptalA-udhA | | | | | |
| BX3_031 5 | BX_005 | 1) | no | 0.013 | 0.006 | 0.000 | 0.008 |
| | 91 | pACYC177- | | | | | |
| | | kan-ptrc- | | | | | |
| | | mcr | | | | | |
| BX3_031 6 | BX_005 | 1) | no | 0.010 | 0.012 | 0.000 | 0.007 |
| | 95 | pACYC177- | | | | | |
| | | kan-ptrc- | | | | | |
| | | mcr | | | | | |
| BX3_033 3 | BX_005 | 1) | no | 0.005 | 0.004 | 0.000 | 0.002 |
| | 91 | pACYC177- | | | | | |
| | | kan [symbol] ptrc- | | | | | |
| | | mcr-PtpiA- | | | | | |
| | | accAD- | | | | | |
| | | PrpiA- | | | | | |
| | | accBC | | | | | |
| BX3_033 4 | BX_005 | 1) | no | 0.300 | 0.013 | 0.007 | 0.134 |
| | BX 9-5 | pACYC177- | | | | | |
| | | kan-ptrc- | | | | | |
| | | mcr-PtpiA- | | | | | |
| | | accAD- | | | | | |
| | | PrpiA- | | | | | |
| | | accBC | | | | | |
| BX3_031 7 | BX_005 | 1) | no | <0.001 | 0.000 | <0.2 | <0.2 |
| | 91 | pACYC177- | | | | | |
| | | kan-ptrc- | | | | | |
| | | mcr 2) pIrc- | | | | | |
| | | ptrc-fabF- | | | | | |
| | | amp | | | | | |
| BX3_031 7 | BX_005 | 1) | yes | 0.033 | 0.024 | 0.001 | 0.021 |
| | 91 | pACYC177- | | | | | |
| | | kan-ptrc- | | | | | |
| | | mcr 2) pIrc- | | | | | |
| | | ptrc-fabF- | | | | | |
| | | amp | | | | | |
| BX3_033 8 | BX_005 | 1) | no | 0.010 | 0.005 | 0.000 | 0.004 |
| | 91 | pACYC177- | | | | | |
| | | kan [symbol] ptrc- | | | | | |
| | | mcr-PtpiA- | | | | | |
| | | accAD [symbol] PrpiA- | | | | | |
| | | accBC 2) | | | | | |
| | | pIrc-ptrc- | | | | | |
| | | fabF-amp | | | | | |
| BX3_033 8 | BX_005 | 1) | yes | 1.580 | 0.142 | 0.006 | 0.116 |
| | 91 | pACYC177- | | | | | |
| | | kan [symbol] ptrc- | | | | | |
| | | mcr-PtpiA- | | | | | |
| | | accAD [symbol] PrpiA- | | | | | |
| | | accBC 2) | | | | | |
| | | pIrc-ptrc- | | | | | |
| | | fabF-amp | | | | | |
| BX3_031 8 | BX_005 | 1) | no | 0.161 | 0.013 | 0.005 | 0.097 |
| | 95 | pACYC177- | | | | | |
| | | kan-ptrc- | | | | | |
| | | mcr 2) pIrc- | | | | | |
| | | ptrc-fabF- | | | | | |
| | | amp | | | | | |
| BX3_031 8 | BX_005 | 1) | yes | 1.330 | 0.101 | 0.049 | 0.976 |
| | 95 | pACYC177- | | | | | |
| | | kan-ptrc- | | | | | |
| | | mcr 2) pIrc- | | | | | |
| | | ptrc-fabF- | | | | | |
| | | amp | | | | | |
| BX3_033 9 | BX_005 | 1) | no | 0.083 | 0.015 | 0.007 | 0.149 |
| | 95 | pACYC177- | | | | | |
| | | kan [symbol] ptrc- | | | | | |
| | | mcr-PtpiA- | | | | | |
| | | accAD [symbol] PrpiA- | | | | | |
| | | accBC 2) | | | | | |
| | | pIrc-ptrc- | | | | | |
| | | fabF-amp | | | | | |
| BX3_033 9 | BX_005 | 1) | yes | 0.010 | 0.009 | 0.000 | 0.007 |
| | 95 | pACYC177- | | | | | |
| | | kan [symbol] ptrc- | | | | | |
| | | mcr-PtpiA- | | | | | |
| | | accAD [symbol] PrpiA- | | | | | |
| | | accBC 2) | | | | | |
| | | pIrc-ptrc- | | | | | |
| | | fabF-amp | | | | | |
| BX3_031 9 | BX_006 | 1) | no | 0.120 | 0.008 | 0.005 | 0.094 |
| | 35 | pACYC177- | | | | | |
| | | kan-ptrc- | | | | | |
| | | mcr 2) pIrc- | | | | | |
| | | ptrc-fabF- | | | | | |
| | | amp | | | | | |
| BX3_031 9 | BX | 1) | yes | 1.068 | 0.450 | 0.043 | 0.854 |
| | BX_006 3-5 | pACYC177- | | | | | |
| | | kan-ptrc- | | | | | |
| | | mcr 2) pIrc- | | | | | |
| | | ptrc-fabF- | | | | | |
| | | amp | | | | | |
| BX3 034 1 | BX_006 | 1) | no | 0.327 | 0.021 | 0.009 | 0.171 |
| | 35 | pACYC177- | | | | | |
| | | kan [symbol] ptrc- | | | | | |
| | | mcr-PtpiA- | | | | | |
| | | accAD [symbol] PrpiA- | | | | | |
| | | accBC 2) | | | | | |
| | | pIrc-ptrc- | | | | | |
| | | fabF-amp | | | | | |
| BX3_034 1 | BX_006 | 1) | yes | 0.140 | 0.017 | 0.015 | 0.293 |
| | 35 | pACYC177- | | | | | |
| | | kan-ptrc- | | | | | |
| | | mcr-PtpiA- | | | | | |
| | | accAD | | | | | |
| | | PrpiA- | | | | | |
| | | accBC 2) | | | | | |
| | | pTrc-ptrc- | | | | | |
| | | fabF-amp | | | | | |
| BX3_034 2 | BX_006 | 1) pTrc- | yes | 0.341 | 0.055 | 0.009 | 0.188 |
| | 35 | ptrc-mcr- | | | | | |
| | | kan 2) | | | | | |
| | | pACYC184- | | | | | |
| | | cat [symbol] PtpiA- | | | | | |
| | | accAD- | | | | | |
| | | PrpiA [symbol] accBC- | | | | | |
| | | T5- | | | | | |
| | | udhA | | | | | |
| BX3 034 3 | BX_006 | 1) pTrc- | yes | 1.927 | 0.047 | 0.077 | 1.536 |
| | 35 | ptrc-mcr- | | | | | |
| | | kan-cynTS | | | | | |
| | | 2) | | | | | |
| | | pACYC184- | | | | | |
| | | cat- | | | | | |
| | | PtpiA- | | | | | |
| | | accAD- | | | | | |
| | | PrpiA- | | | | | |
| | | accBC-T5- | | | | | |
| | | udhA | | | | | |
| BX3_034 4 | BX_006 | 1) pTrc- | yes | 1.562 | 0.280 | 0.040 | 0.797 |
| | 52 | ptrc-mcr- | | | | | |
| | | amp | | | | | |
| BX3_034 5 | BX_006 | 1) pTrc- | yes | 5.195 | 0.229 | 0.184 | 3.678 |
| | 52 | ptrc-mcr- | | | | | |
| | | amp 2) | | | | | |
| | | pJ251-cat- | | | | | |
| | | PtpiA- | | | | | |
| | | accAD- | | | | | |
| | | PrpiA- | | | | | |
| | | accBC | | | | | |
| BX3_034 6 | BX_006 | 1) pTrc- | yes | 1.781 | 0.132 | 0.056 | 1.119 |
| | 52 | ptrc-mcr- | | | | | |
| | | amp 2) | | | | | |
| | | pACYC184- | | | | | |
| | | cat [symbol] PtpiA- | | | | | |
| | | accAD- | | | | | |
| | | PrpiA [symbol] accBC- | | | | | |
| | | ptalA- | | | | | |
| | | udhA | | | | | |
| BX3_034 7 | BX_006 | 1) pTrc- | yes | 1.370 | 0.307 | 0.049 | 0.977 |
| | 53 | ptrc-mcr- | | | | | |
| | | amp 2) | | | | | |
| | | pACYC184- | | | | | |
| | | cat [symbol] PtpiA- | | | | | |
| | | accAD- | | | | | |
| | | PrpiA [symbol] accBC- | | | | | |
| | | ptalA- | | | | | |
| | | udhA | | | | | |
| BX3_034 8 | BX_006 | 1) pTrc- | yes | 1.387 | 0.184 | 0.049 | 0.982 |
| | 54 | ptrc-mcr- | | | | | |
| | | amp 2) | | | | | |
| | | pACYC184- | | | | | |
| | | cat [symbol] PtpiA- | | | | | |
| | | accAD- | | | | | |
| | | PrpiA [symbol] accBC- | | | | | |
| | | ptalA- | | | | | |
| | | udhA | | | | | |
| BX3_032 4 | BX_005 | 1) pTrc- | yes | 0.009 | 0.002 | 0.000 | 0.004 |
| | 91 | ptrc- | | | | | |
| | | Ebmcr-amp | | | | | |
| BX3_032 8 | BX_005 | 1) pTrc- | yes | 0.011 | 0.005 | 0.000 | 0.006 |
| | 95 | ptrc- | | | | | |
| | | Ebmcr-amp | | | | | |

### Example 12C

### Evaluation of BX3_{—}240 Strain with Carbonate Addition

[0616] 3-HP production in E. coli BX3_{—}240 (made by methods above) was evaluated at 100-mL scale in SM3 (minimal salts) media having added sodium carbonate. SM3 used is described under the Common Methods Section, to which was added 10 mM, 20 mM and 50 mM Na2CO3 as treatments. Cultures were started from LB plates containing antibiotics by standard practice (Sambrook and Russell, 2001) into 50 mL of TB media plus the appropriate antibiotics kan and cat and grown to stationary phase overnight at 30° C. with rotation at 250 rpm. Five ml of this culture were transferred to 100 ml of SM3 media plus 30 g/L glucose, antibiotic, the indicated sodium carbonate, 0.1% yeast extract and 1 mM IPTG in triplicate 250-ml baffled flasks and incubated at 30° C., 250 rpm. Flasks were shifted to 37° C., 250 rpm after 4 hours. To monitor cell growth and 3-HP production by these cultures, samples (2 ml) were withdrawn at 24, 48 and 60 hours for optical density measurements at 600 nm (OD600, 1 cm path length) and pelleted by centrifugation at 14000 rpm for 5 min and the supernatant collected for analysis of 3-HP production as described under “Analysis of cultures for 3-HP production” in the Common Methods section. 3-HP titer and standard deviation is expressed as g/L. Dry cell weight (DCW) is calculated as 0.33 times the measured OD₆₀₀ value, based on baseline DCW per OD₆₀₀ determinations. All data are the average of triplicate cultures. For comparison purposes, product to cell ratio is calculated from the averaged data over 60 hours and is expressed as g 3-HP produced per gDCW.

[0617] 3-HP titer were 0.32 (+/−0.03), 0.87 (+/−0.10), 2.24 (+/−0.03), 4.15 (+/−0.27), 6.24 (+/−0.51), 7.50 (+/−0.55) and 8.03 (+/−0.14) g/L at 9, 11, 15, 19, 24, 48 and 60 hr, respectively. Biomass concentrations were 0.54 (+/−0.02), 0.79 (+/−0.03), 1.03 (+/−0.06), 1.18 (+/−0.04), 1.20 (+/−0.12), 1.74 (+/−0.30) and 1.84 (+/−0.22) at 9, 11, 15, 19, 24, 48 and 60 hr, respectively. Maximum product to cell ratio was 4.6 g 3-HP/g DCW.

### Example 13A

### General Example of Genetic Modification to a Host Cell

[0618] In addition to the above specific examples, this example is meant to describe a non-limiting approach to genetic modification of a selected microorganism to introduce a nucleic acid sequence of interest. Alternatives and variations are provided within this general example. The methods of this example are conducted to achieve a combination of desired genetic modifications in a selected microorganism species, such as a combination of genetic modifications as described in sections herein, and their functional equivalents, such as in other bacterial and other microorganism species.

[0619] A gene or other nucleic acid sequence segment of interest is identified in a particular species (such as E. coli as described herein) and a nucleic acid sequence comprising that gene or segment is obtained.

[0620] Based on the nucleic acid sequences at the ends of or adjacent the ends of the segment of interest, 5′ and 3′ nucleic acid primers are prepared. Each primer is designed to have a sufficient overlap section that hybridizes with such ends or adjacent regions. Such primers may include enzyme recognition sites for restriction digest of transposase insertion that could be used for subsequent vector incorporation or genomic insertion. These sites are typically designed to be outward of the hybridizing overlap sections. Numerous contract services are known that prepare primer sequences to order (e.g., Integrated DNA Technologies, Coralville, Iowa USA).

[0621] Once primers are designed and prepared, polymerase chain reaction (PCR) is conducted to specifically amplify the desired segment of interest. This method results in multiple copies of the region of interest separated from the microorganism's genome. The microorganism's DNA, the primers, and a thermophilic polymerase are combined in a buffer solution with potassium and divalent cations (e.g., Mg or Mn) and with sufficient quantities of deoxynucleoside triphosphate molecules. This mixture is exposed to a standard regimen of temperature increases and decreases. However, temperatures, components, concentrations, and cycle times may vary according to the reaction according to length of the sequence to be copied, annealing temperature approximations and other factors known or readily learned through routine experimentation by one skilled in the art.

[0622] In an alternative embodiment the segment of interest may be synthesized, such as by a commercial vendor, and prepared via PCR, rather than obtaining from a microorganism or other natural source of DNA.

[0623] The nucleic acid sequences then are purified and separated, such as on an agarose gel via electrophoresis. Optionally, once the region is purified it can be validated by standard DNA sequencing methodology and may be introduced into a vector. Any of a number of vectors may be used, which generally comprise markers known to those skilled in the art, and standard methodologies are routinely employed for such introduction. Commonly used vector systems are pSMART (Lucigen, Middleton, Wis.), pET E. coli EXPRESSION SYSTEM (Stratagene, La Jolla, Calif.), pSC-B StrataClone Vector (Stratagene, La Jolla, Calif.), pRANGER-BTB vectors (Lucigen, Middleton, Wis.), and TOPO vector (Invitrogen Corp, Carlsbad, Calif., USA). Similarly, the vector then is introduced into any of a number of host cells. Commonly used host cells are E. cloni 100 (Lucigen, Middleton, Wis.), E. cloni 10GF′ (Lucigen, Middleton, Wis.), StrataClone Competent cells (Stratagene, La Jolla, Calif.), E. coli BL21, E. coli BW25113, and E. coli K12 MG1655. Some of these vectors possess promoters, such as inducible promoters, adjacent the region into which the sequence of interest is inserted (such as into a multiple cloning site), while other vectors, such as pSMART vectors (Lucigen, Middleton, Wis.), are provided without promoters and with dephosphorylated blunt ends. The culturing of such plasmid-laden cells permits plasmid replication and thus replication of the segment of interest, which often corresponds to expression of the segment of interest.

[0624] Various vector systems comprise a selectable marker, such as an expressible gene encoding a protein needed for growth or survival under defined conditions. Common selectable markers contained on backbone vector sequences include genes that encode for one or more proteins required for antibiotic resistance as well as genes required to complement auxotrophic deficiencies or supply critical nutrients not present or available in a particular culture media. Vectors also comprise a replication system suitable for a host cell of interest.

[0625] The plasmids containing the segment of interest can then be isolated by routine methods and are available for introduction into other microorganism host cells of interest. Various methods of introduction are known in the art and can include vector introduction or genomic integration. In various alternative embodiments the DNA segment of interest may be separated from other plasmid DNA if the former will be introduced into a host cell of interest by means other than such plasmid.

[0626] While steps of the general example involve use of plasmids, other vectors known in the art may be used instead. These include cosmids, viruses (e.g., bacteriophage, animal viruses, plant viruses), and artificial chromosomes (e.g., yeast artificial chromosomes (YAC) and bacteria artificial chromosomes (BAC).

[0627] Host cells into which the segment of interest is introduced may be evaluated for performance as to a particular enzymatic step, and/or tolerance or bio-production of a chemical compound of interest. Selections of better performing genetically modified host cells may be made, selecting for overall performance, tolerance, or production or accumulation of the chemical of interest.

[0628] It is noted that this procedure may incorporate a nucleic acid sequence for a single gene (or other nucleic acid sequence segment of interest), or multiple genes (under control of separate promoters or a single promoter), and the procedure may be repeated to create the desired heterologous nucleic acid sequences in expression vectors, which are then supplied to a selected microorganism so as to have, for example, a desired complement of enzymatic conversion step functionality for any of the herein-disclosed metabolic pathways. However, it is noted that although many approaches rely on expression via transcription of all or part of the sequence of interest, and then translation of the transcribed mRNA to yield a polypeptide such as an enzyme, certain sequences of interest may exert an effect by means other than such expression.

[0629] The specific laboratory methods used for these approaches are well-known in the art and may be found in various references known to those skilled in the art, such as Sambrook and Russell, Molecular Cloning: A Laboratory Manual, Third Edition 2001 (volumes 1-3), Cold Spring Harbor Laboratory Press, Cold Spring Harbor, N.Y. (hereinafter, Sambrook and Russell, 2001).

[0630] As an alternative to the above, other genetic modifications may also be practiced, such as a deletion of a nucleic acid sequence of the host cell's genome. One non-limiting method to achieve this is by use of Red/ET recombination, known to those of ordinary skill in the art and described in U.S. Pat. Nos. 6,355,412 and 6,509,156, issued to Stewart et al. and incorporated by reference herein for its teachings of this method. Material and kits for such method are available from Gene Bridges (Gene Bridges GmbH, Dresden, Germany, <<www.genebridges.com>>), and the method may proceed by following the manufacturer's instructions. Targeted deletion of genomic DNA may be practiced to alter a host cell's metabolism so as to reduce or eliminate production of undesired metabolic products. This may be used in combination with other genetic modifications such as described herein in this general example.

### Example 13B

### Utilization of Sucrose as the Feedstock for Production of 3-HP and Other Products

[0631] Common laboratory and industrial strains of E. coli, such as the strains described herein, are not capable of utilizing sucrose as the sole carbon source, although this property is found in a number of wild strains, including pathogenic E. coli strains. Sucrose, and sucrose-containing feedstocks such as molasses, are abundant and often used as feedstocks for the production by microbial fermentation of organic acids, amino acids, vitamins, and other products. Thus further derivatives of the 3-HP-producing strains that are capable of utilizing sucrose would expand the range of feedstocks that can be utilized to produce 3-HP.

[0632] Various sucrose uptake and metabolism systems are known in the art (for example, U.S. Pat. No. 6,960,455), incorporated by reference for such teachings. We describe the construction of E. coli strains that harbor the csc genes confering the ability to utilize sucrose via a non-phosphotransferase system, wherein the csc genes constitute cscA, encoding a sucrose hydrolase, cscB, encoding a sucrose permease, cscK, encoding a fructokinase, and cscR, encoding a repressor. The sequences of these genes are annotated in the NCBI database as accession No. X81461 AF473544. To allow efficient expression utilizing codons that are highly abundant in E. coli genes, an operon containing cscB, cscK, and cscA was designed and synthesized using the services of a commercial synthetic DNA provider (DNA 2.0, Menlo Park, Calif.). The amino acid sequences of the genes are set forth as, respectively, cscB-SEQ. ID. No. 141; cscA-SEQ. ID. No. 142; csck-SEQ. ID. No. 143. The synthetic operon consisted of 60 base pairs of the region of the E. coli genome immediately 5′ (upstream) of the adhE gene, a consensus strong promoter to drive expression of the csc genes, the coding regions for cscB, cscK, and cscA with short intergenic regions containing ribosome binding sites but no promoters, and 60 by immediately 3′ (downstream) of the adhE gene. The segments homologous to sequences flanking the adhE gene will be used to target insertion of the csc operon genes into the E. coli chromosome, with the concomittent deletion of adhE. The nucleotide sequence of the entire synthetic construct is shown as SEQ. ID. No. 144. The synthetic csc operon is constructed in plasmid pJ214 (DNA 2.0, Menlo Park, Calif.) that provides an origin of replication derived from plasmid p15A and a gene conferring resistance to ampicillin. This plasmid is denoted pSUCR. A suitable host cell, such as E. coli strain BX_{—}595, is transformed simultaneously with pSUCR and with plasmid pTrc_kan_mcr or other suitable plasmid, and transformed strains selected for on LB medium plates containing ampicillin and kanamycin. Transformants carrying both plasmids are grown and evaluated for 3-HP production in shake flasks as described, except that the glucose in SM3 medium is replaced with an equal concentration of sucrose.

[0633] Genes that confer functions to enable utilization of sucrose by E. coli can also be obtained from the natural isolate pUR400 (Cowan, P. J., et al. J. Bacteriol. 173:7464-7470, 1991) which carries genes for the phosphoenolpyruvate-dependent carbohydrate uptake phosphotransferase system (PTS). These genes consist of scrA, encoding the enzyme II component of the PTS transport complex, scrB, encoding sucrose-6 phosphate hydrolase, scrK, encoding fructokinase, and scrY, encoding a porin. These genes may be isolated or synthesized as described above, incorporated on a plasmid, and transformed into a suitable host cell, such as E. coli strain BX_{—}595, simultaneously with plasmid pTrc_kan_mcr or other suitable plasmid, and transformed strains selected for on LB medium plates containing the appropriate antibiotics. Transformants carrying both plasmids are grown and evaluated for 3-HP production in shake flasks as described, except that the glucose in SM3 medium is replaced with an equal concentration of sucrose.

### Example 13C

### Construction and Evaluation of Additional Strains

[0634] Other strains are produced that comprise various combinations of the genetic elements (additions, deletions and modifications) described herein are evaluated for and used for 3-HP production, including commercial-scale production. The following table illustrates a number of these strains.

[0635] Additionally, a further deletion or other modification to reduce enzymatic activity, of multifunctional 2-keto-3-deoxygluconate 6-phosphate aldolase and 2-keto-4-hydroxyglutarate aldolase and oxaloacetate decarboxylase (eda in E. coli), may be provided to various strains. Further to the latter, in various embodiments combined with such reduction of enzymatic activity of multifunctional 2-keto-3-deoxygluconate 6-phosphate aldolase and 2-keto-4-hydroxyglutarate aldolase and oxaloacetate decarboxylase (eda in E. coli), further genetic modifications may be made to increase a glucose transporter (e.g. galP in E. coli) and/or to decrease activity of one or more of heat stable, histidyl phosphorylatable protein (of PTS) (ptsH (HPr) in E. coli), phosphoryl transfer protein (of PTS) (ptsl in E. coli), and the polypeptide chain of PTS (Crr in E. coli).

[0636] These strains are evaluated in either flasks, or fermentors, using the methods described above. Also, it is noted that after a given extent of evaluation of strains that comprise introduced plasmids, the genetic elements in the plasmids may be introduced into the microorganism genome, such as by methods described herein as well as other methods known to those skilled in the art.

TABLE 35

| Strain | Host | Plasmids |
|---|---|---|
| BX3P_001 | F-, A(araD-araB)567, AlacZ4787(::rrnB-3), LAM-, rph-1, A(rhaD- | 1) ptrc-mcr |
| | rhaB)568, hsdR514, AldhA::frt, ApflB::frt, AmgsA::frt, ApoxB::frt, | |
| | Apta-ack::frt, fablts (S241F)-zeoR T5 aceEF, T5-pntAB, T5-udhA, | |
| | fabB-tS | |
| BX3P_002 | F-, A(araD-araB)567, AlacZ4787(::rrnB-3), LAM-, rph-1, A(rhaD- | 1) ptrc-mcr, |
| | rhaB)568, hsdR514, AldhA::frt, ApflB::frt, AmgsA::frt, ApoxB::frt, | 2) accABCD |
| | Apta-ack::frt, fablts (S241F)-zeoR T5 aceEF, T5-pntAB, T5-udhA, | |
| | fabB-tS | |
| BX3P_003 | F-, A(araD-araB)567, AlacZ4787(::rrnB-3), LAM-, rph-1, A(rhaD- | 1) ptrc-mcr, |
| | rhaB)568, hsdR514, AldhA::frt, ApflB::frt, AmgsA::frt, ApoxB::frt, | 2) accABCD- |
| | Apta-ack::frt, fablts (S241F)-zeoR T5 aceEF, T5-pntAB, T5-udhA, | udhA |
| | fabB-tS | |
| BX3P-004 | F-, A(araD-araB)567, AlacZ4787(::rrnB-3), LAM-, rph-1, A(rhaD- | 1) ptrc-mcr |
| | rhaB)568, hsdR514, AldhA::frt, ApflB::frt, AmgsA::frt, ApoxB::frt, | |
| | Apta-ack::frt, fablts (S241F)-zeoRT5 aceEF, T5-pntAB, T5-udhA, | |
| | relA, spoT | |
| BX3P-005 | F-, A(araD-araB)567, AlacZ4787(::rrnB-3), LAM-, rph-1, A(rhaD- | 1) ptrc-mcr, |
| | rhaB)568, hsdR514, AldhA::frt, ApflB::frt, AmgsA::frt, ApoxB::frt, | 2) accABCD |
| | Apta ack::frt, fablts (S241F)-zeoRT5 aceEF, T5-pntAB, T5-udhA, | |
| | relA, spoT | |
| BX3P_006 | F-, A(araD-araB)567, AlacZ4787(::rrnB-3), LAM-, rph-1, A(rhaD- | 1) ptrc-mcr, |
| | rhaB)568, hsdR514, AldhA::frt, ApflB::frt, AmgsA::frt, ApoxB::frt, | 2) accABCD |
| | Apta-ack::frt, fablts (S241F)-zeoRT5 aceEF, T5-pntAB, T5-udhA, | udhA |
| | relA, spoT | |
| BX3P_007 | F-, A(araD-araB)567, AlacZ4787(::rrnB-3), LAM-, rph-1, A(rhaD- | 1) ptrc-mcr |
| | rhaB)568, hsdR514, AldhA::frt, ApflB::frt, AmgsA::frt, ApoxB::frt, | |
| | Apta-ack::frt, fablts (S241F)-zeoRT5 aceEF, del-arcA:kan | |
| BX3P_008 | F-, A(araD-araB)567, AlacZ4787(::rrnB-3), LAM-, rph-1, A(rhaD- | 1) ptrc-mcr, |
| | rhaB)568, hsdR514, AldhA::frt, ApflB::frt, AmgsA::frt, ApoxB::frt, | 2) accABCD |
| | Apta-ack::frt, fablts (S241F)-zeoRT5 aceEF, del-arcA:kan | |
| BX3P_009 | F-, A(araD-araB)567, AlacZ4787(::rrnB-3), LAM-, rph-1, A(rhaD- | 1) ptrc-mcr, |
| | rhaB)568, hsdR514, AldhA::frt, ApflB::frt, AmgsA::frt, ApoxB::frt, | 2) accABCD- |
| | Apta-ack::frt, fablts (S241F)-zeoRT5 aceEF, del-arcA:kan | udhA |
| BX3P-010 | F-, A(araD-araB)567, AlacZ4787(::rrnB-3), LAM-, rph-1, A(rhaD- | 1) ptrc-mcr |
| | rhaB)568, hsdR514, AldhA::frt, ApflB::frt, AmgsA::frt, ApoxB::frt, | |
| | Apta-ack::frt, fablts (S241F)-zeoRT5 aceEF, T5-pntAB, T5-udhA, | |
| | del-aldA, del puuC, del arcA, del aldB, spoT, relA, T5-cynTS | |
| BX3P-011 | F-, A(araD-araB)567, AlacZ4787(::rrnB-3), LAM-, rph-1, A(rhaD- | 1) ptrc-mcr, |
| | rhaB)568, hsdR514, AldhA::frt, ApflB::frt, AmgsA::frt, ApoxB::frt, | 2) accABCD |
| | Apta-ack::frt, fablts (S241F)-zeoRT5 aceEF, T5-pntAB, T5-udhA, | |
| | del-aldA, del puuC, del arcA, del aldB, spoT, relA, T5-cynTS | |
| BX3P-012 | F-, A(araD-araB)567, AlacZ4787(::rrnB-3), LAM-, rph-1, A(rhaD- | 1) ptrc-mcr, |
| | rhaB)568, hsdR514, AldhA::frt, ApflB::frt, AmgsA::frt, ApoxB::frt, | 2) accABCD- |
| | Apta ack::frt, fablts (S241F)-zeoRT5 aceEF, T5-pntAB, T5-udhA, | udhA |
| | del-aldA, del puuC, del arcA, del aldB, spoT, relA, T5-cynTS | |
| BX3P_013 | F-, A(araD-araB)567, AlacZ4787(::rrnB-3), LAM-, rph-1, | 1) ptrc-mcr |
| | A(rhaDrhaB)568, hsdR514, AldhA::frt, ApflB::frt, AmgsA::frt, | |
| | ApoxB::frt, Apta-ack::frt, fablts (S241F)-zeoRT5 aceEF, T5- | |
| | pntAB, T5-udhA, del-aldA, del puuC, del arcA, del aldB, spoT, | |
| | relA, T5-cynTS, fabBts | |
| BX3P_014 | F-, A(araD-araB)567, AlacZ4787(::rrnB-3), LAM-, rph-1, | 1) ptrc-mcr, |
| | A(rhaDrhaB)568, hsdR514, AldhA::frt, ApflB::frt, AmgsA::frt, | 2) accABCD |
| | ApoxB::frt, Apta-ack::frt, fablts (S241F)-zeoRT5 aceEF, T5- | |
| | pntAB, T5-udhA, del-aldA, del puuC, del arcA, del aldB, spoT, | |
| | relA, T5-cynTS, fabB- is | |
| BX3P_015 | F-, A(araD-araB)567, AlacZ4787(::rrnB-3), LAM-, rph-1, | 1) ptrc-mcr, |
| | A(rhaDrhaB)568, hsdR514, AldhA::frt, ApflB::frt, AmgsA::frt, | 2) accABCD- |
| | ApoxB::frt, Apta-ack::frt, fablts (S241F)-zeoRT5 aceEF, T5- | udhA |
| | pntAB, T5-udhA, del-aldA, del puuC, del arcA, del aldB, spoT, | |
| | relA, T5-cynTS, fabB- is | |
| BX3P-016 | F-, A(araD-araB)567, AlacZ4787(::rrnB-3), LAM-, rph-1, A(rhaD- | 1) ptrc-mcr |
| | rhaB)568, hsdR514, AldhA::frt, ApflB::frt, AmgsA::frt, ApoxB::frt, | |
| | Apta-ack::frt, fablts (S241F)-zeoRT5 aceEF, T5-pntAB, T5-udhA, | |
| | T5-cynTS | |
| BX3P-017 | F-, A(araD-araB)567, AlacZ4787(::rrnB-3), LAM-, rph-1, A(rhaD- | 1) ptrc-mcr, |
| | rhaB)568, hsdR514, AldhA::frt, ApflB::frt, AmgsA::frt, ApoxB::frt, | 2) accABCD |
| | Apta-ack::frt, fablts (S241F)-zeoRT5 aceEF, T5-pntAB, T5-udhA, | |
| | T5-cynTS | |
| BX3P_018 | F-, A(araD-araB)567, AlacZ4787(::rrnB-3), LAM-, rph-1, A(rhaD- | 1) ptrc-mcr, |
| | rhaB)568, hsdR514, AldhA::frt, ApflB::frt, AmgsA::frt, ApoxB::frt, | 2) accABCD- |
| | Apta-ack::frt, fablts (S241F)-zeoRT5 aceEF, T5-pntAB, T5-udhA, | uhA |
| | T5-cynTS | |
| BX3P_019 | F-, A(araD-araB)567, AlacZ4787(::rrnB-3), LAM-, rph-1, A(rhaD- | 1) ptrc-mcr |
| | rhaB)568, hsdR514, AldhA::frt, ApflB::frt, AnagsA::frt, | |
| | ApoxB::frt, Apta-ack::frt, fablts (S241F)-zeoRT5 aceEF, T5-pntAB, | |
| | T5-udhA, del puuC, del arcA, del aldB, spoT, relA, T5-cynTS | |
| BX3P_020 | F-, A(araD-araB)567, AlacZ4787(::rrnB-3), LAM-, rph-1, A(rhaD- | 1) ptrc-mcr, |
| | rhaB)568, hsdR514, AldhA::frt, ApflB::frt, AmgsA::frt, ApoxB::frt, | 2) accABCD |
| | Apta-ack::frt, fablts (S241F)-zeoRT5 aceEF, T5-pntAB, T5-udhA, | |
| | del puuC, del arcA, del aldB, spoT, relA, T5-cynTS | |
| BX3P_021 | F-, A(araD-araB)567, AlacZ4787(::rrnB-3), LAM-, rph-1, A(rhaD- | 1) ptrc-mcr, |
| | rhaB)568, hsdR514, AldhA::frt, ApflB::frt, AmgsA::frt, ApoxB::frt, | 2) accABCD- |
| | Apta-ack::frt, fablts (S241F)-zeoRT5 aceEF, T5-pntAB, T5-udhA, | udhA |
| | del puuC, del arcA, del aldB, spoT, relA, T5-cynTS | |
| BX3P_022 | F-, A(araD-araB)567, AlacZ4787(::rrnB-3), LAM-, rph-1, A(rhaD- | 1) ptrc-mcr |
| | rhaB)568, hsdR514, AldhA::frt, ApflB::frt, AnagsA::frt, | |
| | ApoxB::frt, Apta-ack::frt, fablts (S241F)-zeoRT5 aceEF, T5-pntAB, | |
| | T5-udhA, del-aldA, del puuC, del aldB, spoT, relA, T5-cynTS, | |
| | fabB-ts | |
| BX3P_023 | F-, A(araD-araB)567, AlacZ4787(::rrnB-3), LAM-, rph-1, A(rhaD- | 1) ptrc-mcr, |
| | rhaB)568, hsdR514, AldhA::frt, ApflB::frt, AmgsA::frt, ApoxB::frt, | 2) accABCD |
| | Apta-ack::frt, fablts (S241F)-zeoRT5 aceEF, T5-pntAB, T5-udhA, | |
| | del-aldA, del puuC, del aldB, spoT, relA, T5-cynTS, fabB-ts | |
| BX3P_024 | F-, A(araD-araB)567, AlacZ4787(::rrnB-3), LAM-, rph-1, A(rhaD- | 1) ptrc-mcr, |
| | rhaB)568, hsdR514, AldhA::frt, ApflB::frt, AnagsA::frt, | 2) accABCD- |
| | ApoxB::frt, Apta-ack::frt, fablts (S241F)-zeoRT5 aceEF, T5-pntAB, | udhA |
| | T5-udhA, del-aldA, del puuC, del aldB, spoT, relA, T5-cynTS, | |
| | fabB-ts | |
| BX3P_025 | F-, A(araD-araB)567, AlacZ4787(::rrnB-3), LAM-, rph-1, A(rhaD- | 1) pACYCmcr- |
| | rhaB)568, hsdR514, AldhA::frt, ApflB::frt, AnagsA::frt, | accABCD, 2) |
| | ApoxB::frt, Apta-ack::frt, fablts (S241F)-zeoR, T5-pntAB, T5- | pKK223-metEC645A |
| | aceEF, T5-udhABSD | |
| BX3P_026 | F-, A(araD-araB)567, AlacZ4787(::rrnB-3), LAM-, rph-1, A(rhaD- | 1) pACYCmcr- |
| | rhaB)568, hsdR514, AldhA::frt, ApflB::frt, AnagsA::frt, | accABCD, 2) |
| | ApoxB::frt, Apta-ack::frt, fablts (S241F)-zeoR, T5-pntAB, T5- | pKK223-ct his- |
| | aceEF, T5-udhABSD | thrA |
| BX3P_027 | F-, A(araD-araB)567, AlacZ4787(::rrnB-3), LAM-, rph-1, A(rhaD- | 1) pACYCmcr- |
| | rhaB)568, hsdR514, AldhA::frt, ApflB::frt, AnagsA::frt, ApoxB::frt, | accABCD, 2) |
| | Apta-ack::frt, fablts (S241F)-zeoR, T5-pntAB, T5-aceEF, T5-udhA- | pKK223- |
| | BSD | aroH*457 |
| BX3P_028 | F-, A(araD-araB)567, AlacZ4787(::rrnB-3), LAM-, rph-1, A(rhaD- | 1) pACYCmcr- |
| | rhaB)568, hsdR514, AldhA::frt, ApflB::frt, AnagsA::frt, | accABCD, 2) |
| | ApoxB::frt, Apta-ack::frt, fablts (S241F)-zeoR, T5-pntAB, T5- | psmart-hcamp- |
| | aceEF, T5-udhA-BSD | cadA |
| BX3P_029 | F-, A(araD-araB)567, AlacZ4787(::rrnB-3), LAM-, rph-1, A(rhaD- | 1) pACYCmcr- |
| | rhaB)568, hsdR514, AldhA::frt, ApflB::frt, AnagsA::frt, | accABCD, 2) |
| | ApoxB::frt, Apta-ack::frt, fablts (S241F)-zeoR, T5-pntAB, T5- | psmart-hcamp- |
| | aceEF, T5-udhA-BSD | metC |
| BX3P_030 | F-, A(araD-araB)567, AlacZ4787(::rrnB-3), LAM-, rph-1, A(rhaD- | 1) pACYCmcr- |
| | rhaB)568, hsdR514, AldhA::frt, ApflB::frt, AnagsA::frt, | accABCD, 2) |
| | ApoxB::frt, Apta-ack::frt, fablts (S241F)-zeoR, T5-pntAB, T5- | psmart- |
| | aceEF, T5-udhA-BSD | |
| | | hcampnrdAB |
| BX3P_031 | F-, A(araD-araB)567, AlacZ4787(::rrnB-3), LAM-, rph-1, A(rhaD- | 1) pACYCmcr- |
| | rhaB)568, hsdR514, AldhA::frt, ApflB::frt, AnagsA::frt, ApoxB::frt, | accABCD, 2) |
| | Apta-ack::frt, fablts (S241F)-zeoR, T5-pntAB, T5-aceEF, T5-udhA- | psmart-hcamp- |
| | BSD | prs |

### Example 14

### 3-HP Production

[0637] An inoculum of a genetically modified microorganism that possesses a 3-HP production pathway and other genetic modifications as described above is provided to a culture vessel to which also is provided a liquid media comprising nutrients at concentrations sufficient for a desired bio-process culture period.

[0638] The final broth (comprising microorganism cells, largely ‘spent’ media and 3-HP, the latter at concentrations, in various embodiments, exceeding 1, 2, 5, 10, 30, 50, 75 or 100 grams/liter) is collected and subjected to separation and purification steps so that 3-HP is obtained in a relatively purified state. Separation and purification steps may proceed by any of a number of approaches combining various methodologies, which may include centrifugation, concentration, filtration, reduced pressure evaporation, liquid/liquid phase separation (including after forming a polyamine-3-HP complex, such as with a tertiary amine such as CAS#68814-95-9, Alamine® 336, a triC8-10 alkyl amine (Cognis, Cincinnati, Ohio or Henkel Corp.), membranes, distillation, and/or other methodologies recited in this patent application, incorporated herein. Principles and details of standard separation and purification steps are known in the art, for example in “Bioseparations Science and Engineering,” Roger G. Harrison et al., Oxford University Press (2003), and Membrane Separations in the Recovery of Biofuels and Biochemicals—An Update Review, Stephen A. Leeper, pp. 99-194, in Separation and Purification Technology, Norman N. Li and Joseph M. Cabo, Eds., Marcel Dekker (1992), incorporated herein for such teachings. The particular combination of methodologies is selected from those described herein, and in part is based on the concentration of 3-HP and other components in the final broth.

### Example 15

### Genetic Modification/Introduction of Malonyl-CoA Reductase for 3-HP Production in Bacillus subtilis

[0639] For creation of a 3-HP production pathway in Bacillus Subtilis the codon optimized nucleotide sequence for the malonyl-CoA reductase gene from Chloroflexus aurantiacus that was constructed by the gene synthesis service from DNA 2.0 (Menlo Park, Calif. USA), a commercial DNA gene synthesis provider, was added to a Bacillus Subtilis shuttle vector. This shuttle vector, pHT08 (SEQ ID NO:17), was obtained from Boca Scientific (Boca Raton, Fla. USA) and carries an inducible Pgrac IPTG-inducible promoter.

[0640] This mcr gene sequence was prepared for insertion into the pHT08 shuttle vector by polymerase chain reaction amplification with primer 1 (5′GGAAGGATCCATGTCCGGTACGGGTCG-3′) (SEQ ID NO:18), which contains homology to the start site of the mcr gene and a BamHI restriction site, and primer 2 (5′-Phos-GGGATTAGACGGTAATCGCACGACCG-3′) (SEQ ID NO:19), which contains the stop codon of the mcr gene and a phosphorylated 5′ terminus for blunt ligation cloning. The polymerase chain reaction product was purified using a PCR purification kit obtained from Qiagen Corporation (Valencia, Calif. USA) according to manufacturer's instructions. Next, the purified product was digested with BamHI obtained from New England BioLabs (Ipswich, Mass. USA) according to manufacturer's instructions. The digestion mixture was separated by agarose gel electrophoresis, and visualized under UV transillumination as described in Subsection II of the Common Methods Section. An agarose gel slice containing a DNA piece corresponding to the mcr gene was cut from the gel and the DNA recovered with a standard gel extraction protocol and components from Qiagen (Valencia, Calif. USA) according to manufacturer's instructions.

[0641] This pHT08 shuttle vector DNA was isolated using a standard miniprep DNA purification kit from Qiagen (Valencia, Calif. USA) according to manufacturer's instructions. The resulting DNA was restriction digested with BamHI and Sma1 obtained from New England BioLabs (Ipswich, Mass. USA) according to manufacturer's instructions. The digestion mixture was separated by agarose gel electrophoresis, and visualized under UV transillumination as described in Subsection II of the Common Methods Section. An agarose gel slice containing a DNA piece corresponding to digested pHT08 backbone product was cut from the gel and the DNA recovered with a standard gel extraction protocol and components from Qiagen (Valencia, Calif. USA) according to manufacturer's instructions.

[0642] Both the digested and purified mcr and pHT08 products were ligated together using T4 ligase obtained from New England BioLabs (Ipswich, Mass. USA) according to manufacturer's instructions. The ligation mixture was then transformed into chemically competent 100 E. coli cells obtained from Lucigen Corporation (Middleton Wis., USA) according to the manufacturer's instructions and plated LB plates augmented with ampicillin for selection. Several of the resulting colonies were cultured and their DNA was isolated using a standard miniprep DNA purification kit from Qiagen (Valencia, Calif. USA) according to manufacturer's instructions. The recovered DNA was checked by restriction digest followed by agarose gel electrophoresis. DNA samples showing the correct banding pattern were further verified by DNA sequencing. The sequence verified DNA was designated as pHT08-mcr, and was then transformed into chemically competent Bacillus subtilis cells using directions obtained from Boca Scientific (Boca Raton, Fla. USA). Bacillus subtilis cells carrying the pHT08-mcr plasmid were selected for on LB plates augmented with chloramphenicol.

[0643] Bacillus subtilis cells carrying the pHT08-mcr, were grown overnight in 5 ml of LB media supplemented with 2O ug/mL chloramphenicol, shaking at 225 rpm and incubated at 37 degrees Celsius. These cultures were used to inoculate 1% v/v, 75 mL of M9 minimal media supplemented with 1.47 g/L glutamate, 0.021 g/L tryptophan, 20 ug/mL chloramphenicol and 1 mM IPTG. These cultures were then grown for 18 hours in a 250 mL baffled Erlenmeyer flask at 25 rpm, incubated at 37 degrees Celsius. After 18 hours, cells were pelleted and supernatants subjected to GCMS detection of 3-HP (described in Common Methods Section Mb)). Trace amounts of 3-HP were detected with qualifier ions.

### Example 16

### Bacillus subtilis Strain Construction

[0644] Plasmids may be prepared and transformed into B. subtilis using a modified protocol developed from Anagnostopoulos and Spizizen (Requirements for transformation in Bacillus subtilis. J. Bacteriol. 81:741-746 (1961) as provided with the instructions for the pHT08 shuttle vector by Boca Scientific (Boca Raton, Fla. USA).

### Example 17

### Yeast Aerobic Pathway for 3HP Production

[0645] The following construct (SEQ ID NO:20) containing: 200 by 5′ homology to ACC1,His3 gene for selection, Adh1 yeast promoter, BamHI and Spe1 sites for cloning of MCR, cyc 1 terminator, Tef1 promoter from yeast and the first 200 by of homology to the yeast ACC1 open reading frame will be constructed using gene synthesis (DNA 2.0). The MCR open reading frame (SEQ ID NO:21) will be cloned into the BamHI and Spe1 sites, this will allow for constitutive transcription by the adh1 promoter. Following the cloning of MCR into the construct the genetic element (SEQ ID NO:22) will be isolated from the plasmid by restriction digestion and transformed into relevant yeast strains. The genetic element will knock out the native promoter of yeast ACC1 and replace it with MCR expressed from the adh1 promoter and the Tef1 promoter will now drive yeast ACC1 expression. The integration will be selected for by growth in the absence of histidine. Positive colonies will be confirmed by PCR. Expression of MCR and increased expression of ACCT will be confirmed by RT-PCR.

[0646] An alternative approach that could be utilized to express MCR in yeast is expression of MCR from a plasmid. The genetic element containing MCR under the control of the ADH1 promoter (SEQ ID 4) could be cloned into a yeast vector such as pRS421 (SEQ ID NO:23) using standard molecular biology techniques creating a plasmid containing MCR (SEQ ID NO:24). A plasmid based MCR could then be transformed into different yeast strains. Based on the present disclosure, it is noted that, in addition to introducing a nucleic acid construct that comprises a sequence encoding for malonyl-CoA reductase activity in a yeast cell, in some embodiments additional genetic modifications are made to decrease enoyl-CoA reductase activity and/or other fatty acid synthase activity.

### Example 18

### Yeast Strain Construction

[0647] Yeast strains were constructed using standard yeast transformation and selected for by complementation of auxotrophic markers. All strains are S288C background. For general yeast transformation methods, see Gietz, R. D. and R. A. Woods. (2002) “Transformation of Yeast by the Liac/SS Carrier DNA/PEG Method.” Methods in Enzymology 350: 87-96.

### Example 19

### Production of Flaviolin Polyketide

[0648] This example provides data and analysis from strains to which plasmids were added in various combinations. One such plasmid comprises a gene for 1,3,6,8-tetrahydronapthalene synthase (rppA from Streptomyces coelicolor A3(2)), which was codon-optimized for E. coli (DNA2.0, Menlo Park, Calif. USA). Below this is referred to as THNS, which converts 5 malonyl-CoA to one molecule of 1,3,6,8-naphthalenetetrol, 5 CO2, and 5 coenzyme A. The 1,3,6,8-naphthalenetetrol product of THNS is reported to convert spontaneously to the polyketide flaviolin (CAS No. 479-05-0), which is readily detected spectrometrically at 340 nm. Another plasmid comprises acetyl-CoA carboxylase genes ABCD, which as described elsewhere herein may increase supply of malonyl-CoA from acetyl-CoA.

[0649] Two of the strains comprise mutant forms of one or more genes of the fatty acid synthase pathway. These forms are temperature-sensitive and have lower activity at 37 C. These strains are designated as BX595, comprising a temperature-sensitive mutant fabI, and BX660, comprising both temperature-sensitive fabI and fabB genes.

[0650] The results herein generally demonstrate that polyketide synthesis is increased when a genetically modified microorganism comprises both at least one heterologous nucleic acid sequence of a polyketide synthesis pathway and at least one modification to decrease activity, such as transiently, of one or more enzymatic conversion steps of the fatty acid synthase pathway. This is considered to reduce enzymatic activity in the microorganism's fatty acid synthase pathway providing for reduced conversion of malonyl-CoA to fatty acids, and in this case lead to increased polyketide synthesis.

[0651] The following strains and plasmids were obtained or made using common genetic/molecular biology methods, such as described elsewhere herein, and also in Sambrook and Russell, “Molecular Cloning: A Laboratory Manual,” Third Edition 2001 (volumes 1-3), Cold Spring Harbor Laboratory Press, Cold Spring Harbor, N.Y. Respective genotypes follow strain identifications.

[0652] BW25113 (F-, A(araD-araB)567, AlacZ4787(::rrnB-3), LAM-, rph-1, A(rhaD-rhaB)568, hsdR514)

[0653] BX595 (F-, A(araD-araB)567, AlacZ4787(::rrnB-3), LAM-, rph-1, A(rhaD-rhaB)568, hsdR514,, AldhA:frt, ApflB:frt, mgsA:frt, ApoxB:frt, Apta-ack:frt, fabIts (S241F)-zeoR) BX660 (F-, A(araD-araB)567, AlacZ4787(::rrnB-3), LAM-, rph-1, A(rhaD-rhaB)568, hsdR514, AldhA:frt, ApflB:frt, mgsA:frt, ApoxB:frt, Apta-ack:frt, fabIts (S241F)-zeoR, fabBts-BSD), pTRC-ptrc_THNS (SEQ ID NO:1) (developed from Invitrogen's ptrc-HisA plasmid, Invitrogen, Carlsbad, Calif. USA, with TENS under control of ptrc promoter in this plasmid pJ251-accABCD.

[0654] Using the above-listed E. coli strains and plasmids, the following were prepared by standard introduction of plasmids to E. coli strains:

1. BW25113+pIRC-ptrc_THNS
2. BW25113+pTRC-ptrc_THNS; pJ251+accABCD
3. BX595+pTRC-ptrc_THNS
4. BX595+pTRC-ptrc_THNS; pJ251+accABCD
5. BX660+pTRC-ptrc_THNS
6. BX660+pTRC-ptrc_THNS; pJ251+accABCD

[0655] These then were evaluated as described below by following the protocols summarized for each respective evaluation.

[0656] A: 96 Deep Well Plate Screen:

[0657] The BW25113 and BX595 strains above were run in triplicate. 1 mL SM3 or LB media with amp and IPTG was added to the appropriate number of wells. The wells were inoculated with single colonies picked from plates. The 96 well plate was put at 30 C for −6-8 hours then shifted to 37° C. overnight. After 24 hours, a 200 uL aliquot was removed and transferred to a 96 well flat bottom plate used for measuring absorbance on the spectrometer. The first read was done at OD600 to quantify cell growth and to use for normalizing the flaviolin reading. The plate was then spun at 4000 rpm for 10 minutes. A 150 uL aliquot was removed and read at OD340 to quantify the amount of flaviolin produced. The data is reported as both OD340/OD600 and just OD340.

[0658] B: Shake Flask Screen #1:

[0659] 25 mL cultures of BW25113 and BX595 strains were grown overnight in TB medium with appropriate antibiotics. 50 mL shake flask cultures were set up in SM3 with a 5% inoculation from the TB overnight cultures. The shake flasks were induced at time of inoculation. The cultures were grown for 48 hours and samples were taken for flaviolin readings throughout the experiment. Again, data is reported as both OD340/0D600 and just OD340.

[0660] C: Shake Flask Screen #2:

[0661] The shake flask experiment above was repeated for 24 hours only and with all three background strains mentioned above. Samples were taken at the 24 hour time point only. Data is shown in the figures. ANOVA tests were run when necessary to compare data and find statistically significant results. The amounts of malonyl-CoA produced by the different strains should be evident by flaviolin levels.

### Example 20

### Production of Polyketides

[0662] The following example generally describes polyketide synthesis in E. coli by expression of polyketide synthases (PKS). Briefly, genetically modified E. coli with controlled fatty acid inhibition can be constructed as described in any of the above examples. Any of these strains may be used as starting points for further genetic modifications. Vectors and tools are well known in the art for introducing further genetic modifications, as are promoter systems allowing for controlled or constitutive gene expression. Genes encoding any of numerous PKS enzymes, including type I, type II and type III PKS can be used to introduce these activities into genetically modified organisms that can then convert malonyl-CoA with or without other substrates and reductants including NADPH and NADH into numerous chemical products, for a nonlimiting list of PKS systems refer to the various PKS examples provided in Tables 1A-1H.

### Example 21

### Production of Phloroglucinol

[0663] This example describes phloroglucinol production in E. coli by expression of phloroglucinol synthases. Briefly, genetically modified E. coli with controlled fatty acid inhibition can be constructed as described in any of the above examples. Any of these strains may be used as starting points for further genetic modifications. Vectors and tools are well known in the art for introducing further genetic modifications, as are promoter systems allowing for controlled or constitutive gene expression. Genes encoding phloroglucinol synthase such as that encoded by the ph1D gene of P. fluorescens Pf-5 (or known mutants thereof) can be used to introduce this activity into genetically modified organisms that can then convert 3 molecules of malonyl-CoA into one molecule of phloroglucinol. The sequence of the expressed protein (SEQ ID NO:161) is provided below:

(SEQ ID NO: 161)
MSTLCLPHVMFPQHKITQQQMVDHLENLHADHPRMALAKRMIANTEVNER
HLVLPIDELAVHTGFTHRSIVYEREARQMSSAAARQAIENAGLQISDIRM
VIVTSCTGFMMPSLTAHLINDLALPTSTVQLPIAQLGCVAGAAAINRAND
FARLDARNHVLIVSLEFSSLCYQPDDTKLHAFISAALFGDAVSACVLRAD
DQAGGFKIKKTESYFLPKSEHYIKYDVKDTGFHFTLDKAVMNSIKDVAPV
MERLNYESFEQNCAHNDFFIFHTGGRKILDELVMHLDLASNRVSQS
RSSLSEAGNIASW VFDVLKRQFD SNLNRGDIGL LAAFGPGFTA
EMAVGEWTA

### Example 22

### Production of Resorcinol

[0664] This example describes resorcinol production in E. coli by expression of phloroglucinol synthases and phloroglucinol reductases. Briefly, genetically modified E. coli with controlled fatty acid inhibition can be constructed as described in any of the above examples. Any of these strains may be used as starting points for further genetic modifications. Vectors and tools are well known in the art for introducing further genetic modifications, as are promoter systems allowing for controlled or constitutive gene expression. Genes encoding phloroglucinol synthase such as that encoded by the ph1D gene of P. fluorescens Pf-5 (or known mutants thereof) can be used to introduce this activity into genetically modified organisms that can then convert 3 molecules of malonyl-CoA into one molecule of phloroglucinol. Phloroglucinol can then serve as a substrate for phloroglucinol reductase, which acts to reduce phloroglucinol to dihydrophloroglucinol. Dihydro can then be abiotically converted to resorcinol by acidic conditions such as by acidicd extraction into solvents such as ethyl acetate as described by Armstrong & Patel, “Ablotic conversion of dihydrophloroglucinol to resorcinol” Canadian Journal of -Microbiology, 1993. 39:(9) 899-902., 10.1139/m93-1:35.

### Example 23

### Production of Alkylresorcinol(s)

[0665] This example describes alkylresorcinol production in E. coli by expression of alkylresorcinol synthases (polyketide synthases). Briefly, genetically modified E. coli with controlled fatty acid inhibition can be constructed as described in any of the above examples. Any of these strains may be used as starting points for further genetic modifications. Vectors and tools are well known in the art for introducing further genetic modifications, as are promoter systems allowing for controlled or constitutive gene expression. Genes encoding alkylresorinol synthases can be used to introduce this activity into genetically modified organisms that can then convert malonyl-CoA into alkylresorcinols, generally 3 molecules of malonyl-CoA and fatty acyl-CoA of differing chain lengths are condensed to form alkylresoricnols of differing chain lengths.

### Example 24

### Production of Triacetic Lactone

[0666] The following example details triacetic lactone (TAL) production in E. coli by expression of TAL synthases (polyketide synthases). Briefly, genetically modified E. coli with controlled fatty acid inhibition can be constructed as described in any of the above examples. Any of these strains may be used as starting points for further genetic modifications. Vectors and tools are well known in the art for introducing further genetic modifications, as are promoter systems allowing for controlled or constitutive gene expression. Genes encoding TAL synthases can be used to introduce this activity into genetically modified organisms that can then convert malonyl-CoA and acetyl-CoA into TAL. Specifically Penicillium patulum 6-methylsalycilic acid synthase (6-MSAS) and its mutant (Y1572F) may be used as a TAL synthase for TAL production. (Biotechnol Bioeng. 2006 Mar. 5; 93(4):727-36. Microbial synthesis of triacetic acid lactone. Xie D, Shao Z, Achkar J, Zha W, Frost J W, Zhao H. Department of Chemistry, Michigan State University, East Lansing, Mich. 48824, USA.)

### Example 25

### C10 Fatty Acid Production in E. coli with Fatty Acid Synthase Inhibition

[0667] This example describes C10 fatty acid production in E. coli by expression of malonyl-CoA specific elongases. Briefly, genetically modified E. coli with controlled fatty acid inhibition can be constructed as described in any of the above examples. Any of these strains may be used as starting points for further genetic modifications. Vectors and tools are well known in the art for introducing further genetic modifications, as are promoter systems allowing for controlled or constitutive gene expression. First genes required for fatty acid beta oxidation may be deleted to remove the cells ability to degrade product. In E. coli this can be accomplished by deleting either the fadD or fade genes, in addition to other possible targets in the beta-oxidation pathway. Genes encoding acetoacetyl-CoA thiolase activity such as the phaA genes from ralstonia species or rhodobacter species, may be used to produce acetoacetyl-CoA from 2 molecules of acetyl-CoA. Acetoacetyl-CoA can in turn be converted to (S)-3-hydroxybutyryl-CoA via the action of an NADH dependent (S)-3-hydroxybutyryl-CoA dehydrogenase, such as that encoded by the hbd gene of C. beijerinckii. (S)-3-hydroxybutyryl-CoA can be dehydrated by the actions of crotonase or enoyl-CoA hydratase enzymes such as those encoded by the crt gene from C. acetobutylicum and the ech gene from P. putida respectively to produce crotonyl-CoA. Crotonyl-CoA can then be reduced to butyryl-CoA by the actions of either the NADPH dependent crotonyl-CoA reductase encoded by the crr gene of S. colinus, or the NADH dependent crotonyl-CoA reductase encoded by the ter gene of T. denticola. The result of these enzymatic steps is the production of buyryl-CoA from acetyl-CoA. Butyryl-CoA then serves as the primer unit for the action of the elongase enzymes. The elo1 gene from T. brucei (Genbank accession no. AAX70671) may be expressed to convert butyryl-CoA to C10-fatty acyl-CoA (decanoyl-CoA) by the iterative condensation, dehydration and reduction of 3 molecules of malonyl-CoA, requiring electrons from either NADPH or NADH. Once decanoyl [symbol] CoA is produced the action of a thioesterase such as encoded by the tesA gene of E. coli thioesterase I (known to act on C10-fatty-acyl-CoA, Bonner & Block, Journal of Biological Chemistry, Vol 247., No. 10, 1972, p3123-3133) to produce the free fatty acid, in this case C10 free fatty acid decanoate.

### Example 26

### C10 Fatty Acid Production in E. coli with Fatty Acid Synthase Inhibition

[0668] This example describes C10 fatty acid production in E. coli by expression of malonyl-CoA specific elongases. Briefly, genetically modified E. coli with controlled fatty acid inhibition can be constructed as described in any of the above examples. Any of these strains may be used as starting points for further genetic modifications. Vectors and tools are well known in the art for introducing further genetic modifications, as are promoter systems allowing for controlled or constitutive gene expression. First genes required for fatty acid beta oxidation may be deleted to remove the cells ability to degrade product. In E. coli this can be accomplished by deleting either the fadD or fade genes, in addition to other possible targets in the beta-oxidation pathway. A gene encoding acetoacetyl-CoA synthase activity such as the nphT7 gene from Streptomyces species may be used to produce acetoacetyl-CoA from 1 molecule of acetyl-CoA and 1 molecule of malonyl-CoA. This irreversible reaction can be ensured to accumulate acetoacetyl-CoA pools in E. coli with the additional deletion of the atoB gene encoding an aceto-acetyl-CoA thiolase, which can degrade acetoacetyl-CoA into two molecules of acetyl-CoA. Acetoacetyl-CoA can in turn be converted to (S)-3-hydroxybutyryl-CoA via the action of an NADH dependent (S)-3-hydroxybutyryl-CoA dehydrogenase, such as that encoded by the hbd gene of C. beijerinckii. (S)-3-hydroxybutyryl-CoA can be dehydrated by the actions of crotonase or enoyl-CoA hydratase enzymes such as those encoded by the crt gene from C. acetobutylicum and the ech gene from P. putida respectively to produce crotonyl-CoA. Crotonyl-CoA can then be reduced to butyryl-CoA by the actions of either the NADPH dependent crotonyl-CoA reductase encoded by the crr gene of S. colinus, or the NADH dependent crotonyl-CoA reductase encoded by the ter gene of T. denticola. The result of these enzymatic steps is the production of buyryl-CoA from acetyl-CoA. Butyryl [symbol] CoA then serves as the primer unit for the action of the elongase enzymes. The elo1 gene from T. brucei (Genbank accession no. AAX70671) may be expressed to convert butyryl-CoA to C10-fatty acyl-CoA (decanoyl-CoA) by the iterative condensation, dehydration and reduction of 3 molecules of malonyl-CoA, requiring electrons from either NADPH or NADH. Once decanoyl-CoA is produced the action of a thioesterase such as encoded by the tesA gene of E. coli thioesterase I (known to act on C10-fatty-acyl-CoA, Bonner & Block, Journal of Biological Chemistry, Vol 247., No. 10, 1972, p3123-3133) to produce the free fatty acid, in this case C10 free fatty acid decanoate.

### Example 27

### C10 Fatty Acid Production in E. coli with Fatty Acid Synthase Inhibition

[0669] This example describes C10 fatty acid production in E. coli by expression of malonyl-CoA specific elongases. Briefly, genetically modified E. coli with controlled fatty acid inhibition can be constructed as described in any of the above examples. Any of these strains may be used as starting points for further genetic modifications. Vectors and tools are well known in the art for introducing further genetic modifications, as are promoter systems allowing for controlled or constitutive gene expression. First genes required for fatty acid beta oxidation may be deleted to remove the cells ability to degrade product. In E. coli this can be accomplished by deleting either the fadD or fade genes, in addition to other possible targets in the beta-oxidation pathway. Genes encoding acetoacetyl-CoA thiolase activity such as the phaA genes from ralstonia species or rhodobacter species, may be used to produce acetoacetyl-CoA from 2 molecules of acetyl-CoA. Acetoacetyl-CoA can in turn be converted to (R)-3-hydroxybutyryl-CoA via the action of an NADH or NADPH dependent (R)-3-hydroxybutyryl-CoA dehydrogenase, such as that encoded by the phaB gene of C. necator. (R)-3-hydroxybutyryl-CoA can subsequently epimerized to (S)-3 hydroxybutyryl-CoA by any number of epimerases including those encoded by the fad11 genes of E. coli. (S)-3 hydroxybutyryl-CoA be dehydrated by the actions of crotonase or enoyl [symbol] CoA hydratase enzymes such as those encoded by the crt gene from C. acetobutylicum and the ech gene from P. putida respectively to produce crotonyl-CoA. Crotonyl-CoA can then be reduced to butyryl-CoA by the actions of either the NADPH dependent crotonyl-CoA reductase encoded by the crr gene of S. colinus, or the NADH dependent crotonyl-CoA reductase encoded by the ter gene of T. denticola. The result of these enzymatic steps is the production of buyryl-CoA from acetyl-CoA. Butyryl-CoA then serves as the primer unit for the action of the elongase enzymes. The elo1 gene (Genbank accession no. AAX70671) from T. brucei may be expressed to convert butyryl-CoA to C10-fatty acyl-CoA (decanoyl-CoA) by the iterative condensation, dehydration and reduction of 3 molecules of malonyl-CoA, requiring electrons from either NADPH or NADH. Once decanoyl-CoA is produced the action of a thioesterase such as encoded by the tesA gene of E. coli thioesterase I (known to act on C10-fatty-acyl-CoA, Bonner & Block, Journal of Biological Chemistry, Vol 247., No. 10, 1972, p3123-3133) to produce the free fatty acid, in this case C10 free fatty acid decanoate.

### Example 28

### C10 Fatty Acid Production in E. coli with Fatty Acid Synthase Inhibition

[0670] This example describes C10 fatty acid production in E. coli by expression of malonyl-CoA specific elongases. Briefly, genetically modified E. coli with controlled fatty acid inhibition can be constructed as described in any of the above examples. Any of these strains may be used as starting points for further genetic modifications. Vectors and tools are well known in the art for introducing further genetic modifications, as are promoter systems allowing for controlled or constitutive gene expression. First genes required for fatty acid beta oxidation may be deleted to remove the cells ability to degrade product. In E. coli this can be accomplished by deleting either the fadD or fade genes, in addition to other possible targets in the beta-oxidation pathway. A gene encoding acetoacetyl-CoA synthase activity such as the nphT7 gene from Streptomyces species may be used to produce acetoacetyl-CoA from 1 molecule of acetyl-CoA and 1 molecule of malonyl-CoA. This irreversible reaction can be ensured to accumulate acetoacetyl-CoA pools in E. coli with the additional deletion of the atoB gene encoding an aceto-acetyl-CoA thiolase, which can degrade acetoacetyl-CoA into two molecules of acetyl-CoA. Acetoacetyl-CoA can in turn be converted to (R)-3-hydroxybutyryl-CoA via the action of an NADH or NADPH dependent (R)-3-hydroxybutyryl-CoA dehydrogenase, such as that encoded by the phaB gene of C. necator. (R)-3-hydroxybutyryl-CoA can subsequently epimerized to (S)-3 hydroxybutyryl-CoA by any number of epimerases including those encoded by the fad11 genes of E. coli. (S)-3-hydroxybutyryl-CoA can be dehydrated by the actions of crotonase or enoyl-CoA hydratase enzymes such as those encoded by the crt gene from C. acetobutylicum and the ech gene from P. putida respectively to produce crotonyl-CoA. Crotonyl-CoA can then be reduced to butyryl-CoA by the actions of either the NADPH dependent crotonyl-CoA reductase encoded by the crr gene of S. colinus, or the NADH dependent crotonyl-CoA reductase encoded by the ter gene of T. denticola. The result of these enzymatic steps is the production of buyryl-CoA from acetyl-CoA. Butyryl-CoA then serves as the primer unit for the action of the elongase enzymes. The elo1 gene from T. brucei (Genbank accession no. AAX70671) may be expressed to convert butyr yl-CoA to C10-fatty acyl-CoA (decanoyl-CoA) by the iterative condensation, dehydration and reduction of 3 molecules of malonyl-CoA, requiring electrons from either NADPH or NADH. Once decanoyl-CoA is produced the action of a thioesterase such as encoded by the tesA gene of E. coli thioesterase I (known to act on C10-fatty-acyl-CoA, Bonner & Block, Journal of Biological Chemistry, Vol 247., No. 10, 1972, p3123-3133) to produce the free fatty acid, in this case C10 free fatty acid decanoate.

### Example 29

### C14 Fatty Acid (Myristic Acid) Production in E. coli with Fatty Acid Synthase Inhibition

[0671] This example describes C14 fatty acid production in E. coli by expression of malonyl-CoA specific elongases. Any of the genetically modified mircoorganisms described above that produce C10-fatty-acyl-CoA (decanoyl-CoA) can be further genetically modified to produce C14 fatty acid or myristic acid. Vectors and tools are well known in the art for introducing further genetic modifications, as are promoter systems allowing for controlled or constitutive gene expression. In these microorganisms, decanoyl-CoA can serve as the primer unit for the action of the elongase enzymes. The elo2 gene from T. brucei (Genbank accession no. AAX70672) may be expressed to convert decanoyl-CoA to C14-fatty acyl-CoA (myristyl-CoA) by the iterative condensation, dehydration and reduction of 2 molecules of malonyl-CoA, requiring electrons from either NADPH or NADH. Once myristyl-CoA is produced the action of a thioesterase such as encoded by the tesA gene of E. coli thioesterase I (known to act on C14-fatty-acyl-CoA, Bonner & Block, Journal of Biological Chemistry, Vol 247., No. 10, 1972, p3123-3133) to produce the free fatty acid, in this case C14 free fatty acid myristic acid.

### Example 30

### C18 Fatty Acid (Stearic Acid) Production in E. coli with Fatty Acid Synthase Inhibition

[0672] This example describes C18 fatty acid production in E. coli by expression of malonyl-CoA specific elongases. Any of the genetically modified mircoorganisms described above that produce C14-fatty-acyl-CoA (myristyl-CoA) can be further genetically modified to produce C18 fatty acid or stearic acid. Vectors and tools are well known in the art for introducing further genetic modifications, as are promoter systems allowing for controlled or constitutive gene expression. In these microorganisms, myristyl-CoA can serve as the primer unit for the action of the elongase enzymes. The elo3 gene from T. brucei (Genbank accession no. AAX70673) may be expressed to convert myristyl-CoA to C18-fatty acyl-CoA (stearoyl-CoA) by the iterative condensation, dehydration and reduction of 2 molecules of malonyl-CoA, requiring electrons from either NADPH or NADH. Once stearoyl-CoA is produced the action of a thioesterase such as encoded by the tesA gene of E. coli thioesterase I (known to act on C14-fatty-acyl-CoA, Bonner & Block, Journal of Biological Chemistry, Vol 247., No. 10, 1972, p3123-3133) to produce the free fatty acid, in this case C18 free fatty acid stearic acid.

### Example 31

### Fatty Acid Production in Yeast with Fatty Acid Synthase Inhibition

[0673] Any of the above examples can be ported to any number of other hosts for chemicals production, using tools and techniques well known in the art for genetic modification of a multitude of yeast systems. Briefly, to produce fatty acids in yeast the elongase systems, metabolic pathways to produce fatty acyl-CoAs can be introduced as described above, in addition to genetic modifications to reduce or eliminate native host fatty acid beta-oxidation and inhibit the host fatty acid synthase.

### Example 32

### Fatty Acid Production in Bacillus with Fatty Acid Synthase Inhibition

[0674] Any of the above examples can be ported to any number of other hosts for chemicals production, using tools and techniques well known in the art for genetic modification of a multitude of gram positive systems such as bacillus subtilis. Briefly, to produce fatty acids in bacillus or other gram positive systems the elongase systems, metabolic pathways to produce fatty acyl-CoAs can be introduced as described above, in addition to genetic modifications to reduce or eliminate native host fatty acid beta-oxidation and inhibit the host fatty acid synthase.

### Example 33

### Fatty Acid Production in C. Necator with Fatty Acid Synthase Inhibition

[0675] Any of the above examples can be ported to any number of other hosts for chemicals production, using tools and techniques well known in the art for genetic modification of a multitude of gram negative systems such as C. necator. Briefly, to produce fatty acids in C. necatot the elongase systems, metabolic pathways to produce fatty acyl-CoAs can be introduced as described above, in addition to genetic modifications to reduce or eliminate native host fatty acid beta-oxidation and inhibit the host fatty acid synthase. Additionally, in C. necator modifications to remove polyhydroxybutyrate (PHB) synthesis can be incorporated. C. necator has an additional advatnge of producing fatty acids via the feedstocks, hydrogen and carbon dioxide.

### Example 34

### Diacid Production with Fatty Acid Synthase Inhibition

[0676] This example generally describes diacid synthesis in E. coli by expression of polyketide syntheses (PKS) that have been modified for diacid (dicarboxylic acid) production. Briefly, genetically modified E. coli with controlled fatty acid inhibition can be constructed as described in any of the above examples. Any of these strains may be used as starting points for further genetic modifications. Vectors and tools are well known in the art for introducing further genetic modifications, as are promoter systems allowing for controlled or constitutive gene expression. Genes encoding any of numerous modified PKS enzymes, including type I, type II and type III PKS can be used to introduce these activities into genetically modified organisms that can then convert malonyl-CoA with or without other substrates and reductants including NADPH and NADH into diacids. Specifically PCT Patent Publication No. WO2009/121066 is incorporated by reference for its teachings of diacid production by PKS systems.

### Example 35

### Diene Production with Fatty Acid Synthase Inhibition

[0677] This example generally describes diene synthesis in E. coli by expression of polyketide syntheses (PKS) that have been modified for diene production. Briefly, genetically modified E. coli with controlled fatty acid inhibition can be constructed as described in any of the above examples. Any of these strains may be used as starting points for further genetic modifications. Vectors and tools are well known in the art for introducing further genetic modifications, as are promoter systems allowing for controlled or constitutive gene expression. Genes encoding any of numerous modified PKS enzymes, including type I, type II and type III PKS can be used to introduce these activities into genetically modified organisms that can then convert malonyl-CoA with or without other substrates and reductants including NADPH and NADH into dienes.

### Example 36

### n-Butanol Production with Fatty Acid Synthase Inhibition from Malonyl-CoA

[0678] This example describes n-butanol production in E. coli by expression of malonyl-CoA dependent acetoacetyl [symbol] CoA synthetase. Briefly, genetically modified E. coli with controlled fatty acid inhibition can be constructed as described in any of the above examples. Any of these strains may be used as starting points for further genetic modifications. Vectors and tools are well known in the art for introducing further genetic modifications, as are promoter systems allowing for controlled or constitutive gene expression. A gene encoding acetoacetyl-CoA synthase activity such as the nphT7 gene from Streptomyces species may be used to produce acetoacetyl-CoA from 1 molecule of acetyl [symbol] CoA and 1 molecule of malonyl-CoA. This irreversible reaction can be ensured to accumulate acetoacetyl-CoA pools in E. coli with the additional deletion of the atoB gene encoding an aceto-acetyl-CoA thiolase, which can degrade acetoacetyl-CoA into two molecules of acetyl-CoA. Acetoacetyl-CoA can in turn be converted to (S)-3-hydroxybutyryl-CoA via the action of an NADH dependent (S)-3-hydroxybutyryl-CoA dehydrogenase, such as that encoded by the hbd gene of C. beijerinckii. (S)-3-hydroxybutyryl-CoA can be dehydrated by the actions of crotonase or enoyl-CoA hydratase enzymes such as those encoded by the crt gene from C. acetobutylicum and the ech gene from P. putida respectively to produce crotonyl-CoA. Alternatively, acetoacetyl-CoA can in turn be converted to (R)-3-hydroxybutyryl-CoA via the action of an NADH or NADPH dependent (R)-3-hydroxybutyryl-CoA dehydrogenase, such as that encoded by the phaB gene of C. necator. (R)-3-hydroxybutyryl-CoA can subsequently epimerized to (S)-3 hydroxybutyryl-CoA by any number of epimerases including those encoded by the fad11 genes of E. coli. (S)-3-hydroxybutyryl-CoA can be dehydrated by the actions of crotonase or enoyl-CoA hydratase enzymes such as those encoded by the crt gene from C. acetobutylicum and the ech gene from P. putida respectively to produce crotonyl-CoA. Crotonyl-CoA can then be reduced to butyryl-CoA by the actions of either the NADPH dependent crotonyl-CoA reductase encoded by the crr gene of S. colinus, or the NADH dependent crotonyl-CoA reductase encoded by the ter gene of T. denticola. Butyryl-CoA can then serve as the substrate for the NADH dependent butanol dehydrogenase adhE2 gene from Clostridia acetobutylicum. This enzyme carries out the two step reduction of butyryl-CoA to butanol.

### Example 37

### Isobutanol Production with Fatty Acid Synthase Inhibition from Malonyl-CoA

[0679] This example describes n-butanol production in E. coli by expression of malonyl-CoA dependent acetoacetyl-CoA synthetase. Briefly, genetically modified E. coli with controlled fatty acid inhibition can be constructed as described in any of the above examples. Any of these strains may be used as starting points for further genetic modifications. Vectors and tools are well known in the art for introducing further genetic modifications, as are promoter systems allowing for controlled or constitutive gene expression. A gene encoding acetoacetyl-CoA synthase activity such as the nphT7 gene from Streptomyces species may be used to produce acetoacetyl-CoA from 1 molecule of acetyl-CoA and 1 molecule of malonyl-CoA. This irreversible reaction can be ensured to accumulate acetoacetyl-CoA pools in E. coli with the additional deletion of the atoB gene encoding an aceto-acetyl-CoA thiolase, which can degrade acetoacetyl-CoA into two molecules of acetyl-CoA. Acetoacetyl-CoA can in turn be converted to (S)-3-hydroxybutyryl-CoA via the action of an NADH dependent (S)-3-hydroxybutyryl-CoA dehydrogenase, such as that encoded by the hbd gene of C. beijerinckii. (S)-3-hydroxybutyryl-CoA can be dehydrated by the actions of crotonase or enoyl-CoA hydratase enzymes such as those encoded by the crt gene from C. acetobutylicum and the ech gene from P. putida respectively to produce crotonyl-CoA. Alternatively, acetoacetyl-CoA can in turn be converted to (R)-3-hydroxybutyryl-CoA via the action of an NADH or NADPH dependent (R)-3-hydroxybutyryl-CoA dehydrogenase, such as that encoded by the phaB gene of C. necator. (R)-3-hydroxybutyryl-CoA can subsequently epimerized to (S)-3 hydroxybutyryl-CoA by any number of epimerases including those encoded by the fad11 genes of E. coli. (S)-3-hydroxybutyryl-CoA can be dehydrated by the actions of crotonase or enoyl-CoA hydratase enzymes such as those encoded by the crt gene from C. acetobutylicum and the ech gene from P. putida respectively to produce crotonyl-CoA. Crotonyl-CoA can then be reduced to butyryl-CoA by the actions of either the NADPH dependent crotonyl-CoA reductase encoded by the crr gene of S. colinus, or the NADH dependent crotonyl-CoA reductase encoded by the ter gene of T. denticola. Butyryl-CoA can then serve as the substrate for an isomerase capable of producing isobutyryl-CoA from butyryl-CoA, suh as that endoded by the icmA and icmB genes of Streptoriisi-e

[0680] Isobutyryl-CoA is then the substrate for the NADH dependent dehydrogenases adhE2 that can carry out the two step reduction of isobutyryl-CoA to Isobutanol, such as the adhE genes from Giardia species.

### Example 38

### Chemical Production from Butyryl-CoA as an Intermediate

[0681] Similarly to the production of butanol, described above, the following example details any chemical production stemming from butyryl-CoA as an intermediate by expression of malonyl-CoA dependent acetoacetyl-CoA synthetase. As discussed above, genetically modified E. coli with controlled fatty acid inhibition can be constructed as described in any of the above examples. Any of these strains may be used as starting points for further genetic modifications. Vectors and tools are well known in the art for introducing further genetic modifications, as are promoter systems allowing for controlled or constitutive gene expression. A gene encoding acetoacetyl-CoA synthase activity such as the nphT7 gene from Streptomyces species may be used to produce acetoacetyl-CoA from 1 molecule of acetyl-CoA and 1 molecule of malonyl-CoA. This irreversible reaction can be ensured to accumulate acetoacetyl-CoA pools with the additional deletion of the atoB gene encoding an aceto-acetyl-CoA thiolase, which can degrade acetoacetyl-CoA into two molecules of acetyl-CoA.

[0682] Acetoacetyl-CoA can in turn be converted to (S)-3-hydroxybutyryl-CoA via the action of an NADH dependent (S)-3-hydroxybutyryl-CoA dehydrogenase, such as that encoded by the hbd gene of C. beijerinckii. (S)-3 [symbol] hydroxybutyryl-CoA can be dehydrated by the actions of crotonase or enoyl-CoA hydratase enzymes such as those encoded by the crt gene from C. acetobutylicum and the ech gene from P. putida respectively to produce crotonyl-CoA. Alternatively, acetoacetyl-CoA can in turn be converted to (R)-3-hydroxybutyryl-CoA via the action of an NADH or NADPH dependent (R)-3-hydroxybutyryl-CoA dehydrogenase, such as that encoded by the phaB gene of C. necator. (R)-3-hydroxybutyryl-CoA can subsequently epimerized to (S)-3 hydroxybutyryl [symbol] CoA by any number of epimerases including those encoded by the fad11 genes of E. coli. (S)-3-hydroxybutyryl [symbol] CoA can be dehydrated by the actions of crotonase or enoyl-CoA hydratase enzymes such as those encoded by the crt gene from C. acetobutylicum and the ech gene from P. putida respectively to produce crotonyl-CoA. Crotonyl-CoA can then be reduced to butyryl-CoA by the actions of either the NADPH dependent crotonyl [symbol] CoA reductase encoded by the crr gene of S. colinus, or the NADH dependent crotonyl-CoA reductase encoded by the ter gene of T. denticola. Butyryl-CoA can then serve as the substrate for numerous other chemical products, such as butyrate with activity of a butyryl-CoA hydrolase, or alternatively from the actions of a phosphotranbutyrylase and butyrate kinase such as those encoded by the ptb and bukl genes of Clostridia sp. Additionally, other chemical products may be produced via adding additional enzymes to further convert butyryl-CoA to these products from malonyl-CoA.

### Example 39

### Chemical Production from Isobutyryl-CoA as an Intermediate

[0683] Similarly to the production of butanol, described above, the following example describes any chemical production stemming from isobutyryl-CoA as an intermediate by expression of malonyl-CoA dependent acetoacetyl-CoA synthetase. As discussed above, genetically modified E. coli with controlled fatty acid inhibition can be constructed as described in any of the above examples. Any of these strains may be used as starting points for further genetic modifications. Vectors and tools are well known in the art for introducing further genetic modifications, as are promoter systems allowing for controlled or constitutive gene expression. A gene encoding acetoacetyl-CoA synthase activity such as the nphT7 gene from Streptomyces species may be used to produce acetoacetyl-CoA from 1 molecule of acetyl-CoA and 1 molecule of malonyl-CoA. This irreversible reaction can be ensured to accumulate acetoacetyl-CoA pools with the additional deletion of the atoB gene encoding an aceto-acetyl-CoA thiolase, which can degrade acetoacetyl-CoA into two molecules of acetyl-CoA. Acetoacetyl-CoA can in turn be converted to (S)-3-hydroxybutyryl-CoA via the action of an NADH dependent (S)-3-hydroxybutyryl-CoA dehydrogenase, such as that encoded by the hbd gene of C. beijerinckii. (S)-3-hydroxybutyryl-CoA can be dehydrated by the actions of crotonase or enoyl-CoA hydratase enzymes such as those encoded by the crt gene from C. acetobutylicum and the ech gene from P. putida respectively to produce crotonyl-CoA. Alternatively, acetoacetyl-CoA can in turn be converted to (R)-3-hydroxybutyryl-CoA via the action of an NADH or NADPH dependent (R)-3-hydroxybutyryl-CoA dehydrogenase, such as that encoded by the phaB gene of C. necator. (R)-3-hydroxybutyryl-CoA can subsequently epimerized to (S)-3 hydroxybutyryl-CoA by any number of epimerases including those encoded by the fad11 genes of E. coli. (S)-3-hydroxybutyryl-CoA can be dehydrated by the actions of crotonase or enoyl [symbol] CoA hydratase enzymes such as those encoded by the crt gene from C. acetobutylicum and the ech gene from P. putida respectively to produce crotonyl-CoA. Crotonyl-CoA can then be reduced to butyryl-CoA by the actions of either the NADPH dependent crotonyl-CoA reductase encoded by the crr gene of S. colinus, or the NADH dependent crotonyl-CoA reductase encoded by the ter gene of T. denticola. Butyryl-CoA can then serve as the substrate for an isomerase capable of producing isobutyryl-CoA from butyryl-CoA, suh as that endoded by the icmA and icmB genes of S.frt′pit)rilyt′e, Isobutyryl-CoA can then serve as the substrate for numerous other chemical products, such as isobutyrate with activity of a isobutyryl-CoA hydrolase, or alternatively from the actions of a phosphotransisobutyrylase and isobutyrate kinase. Additionally, other chemical products may be produced via adding additional enzymes to further convert isobutyryl-CoA to these products from malonyl-CoA, such as phlorisobutyrophenone via the actions of either isobutyrophenone synthase form Hypericum calycinum or phlorisobutyrophenone synthase/phlorisovalerophenone synthase encoded by the VPS gene from Humulus lupulus. Additionally, other chemical products may be produced via adding additional enzymes to further convert isobutyryl-CoA to these products from malonyl-CoA.

### Example 40

### Chemical Production from Methacrylyl-CoA as an Intermediate

[0684] Similarly to the production of chemicals in the examples described above, the following example describes any chemical production stemming from methacrylyl-CoA as an intermediate by expression of malonyl-CoA dependent acetoacetyl-CoA synthetase. As discussed above, genetically modififed organisms can be engineered to produce butyryl-CoA and the subsequently isobutyryl-CoA as intermediates. Isobutyryl-CoA can then be further converted to methacrylyl-CoA by the actions of a methylacyl-CoA dehydrogenase such as those encoded by the acdH or Acadsb genes from Streptomyces avermitilis and Rattus norvegicus, respectively. Any of these strains may be used as starting points for further genetic modifications. Other chemical products may be produced via adding additional enzymes to further convert methacrylyl-CoA to these products from malonyl [symbol] CoA, such as methylacrylate via the actions of a methacrylyl-CoA hydrolase. Alternatively, 3-hydroxyisobutyrate can be made from methylacrylyl-CoA via the actions of first a short chain enoyl-CoA hydratase such as those encoded by the ECHS1 or ech genes of Bos Taurus Pseudomonas fluorescens, respectively, converting methylacrylyl-CoA to 3-hydroxyisobutyryl-CoA. 3-hydroxyisobutyryl-CoA can then be converted to 3-hydroxyisobutyrate via the actions of a 3-hydroxyisobutyryl-CoA hydrolase, such as that encoded by the Hibch gene of Rattus norvegicus. Additionally, other chemical products may be produced via adding additional enzymes to further convert methylacryryl-CoA to these products from malonyl-CoA.

### Example 41

### Chemical Production from 3-Hydroxy-3-Methylglutaryl-CoA, as an Intermediate

[0685] Similarly to the production of chemicals in the examples described above, this example describes any chemical production stemming from acetoacetyl-CoA as an intermediate by expression of malonyl-CoA dependent acetoacetyl-CoA synthetase. As discussed above, genetically modified E. coli with controlled fatty acid inhibition can be constructed as described in any of the above examples. Any of these strains may be used as starting points for further genetic modifications. Vectors and tools are well known in the art for introducing further genetic modifications, as are promoter systems allowing for controlled or constitutive gene expression. A gene encoding acetoacetyl-CoA synthase activity such as the nphT7 gene from Streptomyces species may be used to produce acetoacetyl-CoA from 1 molecule of acetyl-CoA and 1 molecule of malonyl-CoA. This irreversible reaction can be ensured to accumulate acetoacetyl-CoA pools, with the additional deletion of the atoB gene encoding an aceto-acetyl-CoA thiolase, which can degrade acetoacetyl-CoA into two molecules of acetyl-CoA. Acetoacetyl-CoA can further be converted to 3-hydroxy-3-methylglutaryl-CoA, by the actions of numerous hydroxymethylglutaryl-CoA syntheses such as that encoded by the hmgS gene of Saccharomyces species. 3-hydroxy-3-methylglutaryl-CoA can further be converted to numerous products via the mevalonate pathway, wherein mevalonate is first produced from 3-hydroxy-3-methylglutaryl-CoA (hmg-CoA) by reduction using enzymes such as the hmg-CoA reductases encoded by numerous genes including the HMG1 and HMG2 genes of Saccharomyces species. The mevalonate pathway is well known as a metabolic pathway allowing the production of numerous products, such as farnesene and other isoprenoids. Additionally, other chemical products may be produced via adding additional enzymes to further convert 3-hydroxy-3-methylglutaryl-CoA or mevalonate to these products from malonyl-CoA.

### Example 42

### Chemical Production in Yeast

[0686] Any of the above examples can be ported to any number of other hosts for chemicals production, using tools and techniques well known in the art for genetic modification of a multitude of yeast systems. Briefly, metabolic pathways to produce products can be introduced as described above.

### Example 43

### Chemical Production in Bacillus

[0687] Any of the above examples can be ported to any number of other hosts for chemicals production, using tools and techniques well known in the art for genetic modification of a multitude of gram positive systems, such as bacillus. Briefly, metabolic pathways to produce products can be introduced as described above.

### Example 44

### Chemical Production in C. necator

[0688] Any of the above examples can be ported to any number of other hosts for chemicals production, using tools and techniques well known in the art for genetic modification of a multitude of gram negative systems, such as C. necatot. Briefly, metabolic pathways to produce products can be introduced as described above. Additionally, in C. necator modifications to remove polyhydroxybutyrate (PHB) synthesis can be incorporated. C. necator has an additional advatnge of producing fatty acids via the feedstocks, hydrogen and carbon dioxide.

### Example 45

### Production of Phloroglucinol

[0689] This example describes phloroglucinol production in E. coli by expression of phloroglucinol synthases. Briefly, genetically modified E. coli with controlled fatty acid inhibition can be constructed as described in any of the above examples. Any of these strains may be used as starting points for further genetic modifications. Vectors and tools are well known in the art for introducing further genetic modifications, as are promoter systems allowing for controlled or constitutive gene expression. Genes encoding phloroglucinol synthase such as that encoded by the ph1D gene of P. fluorescens Pf-5 (or known mutants thereof) can be used to introduce this activity into genetically modified organisms that can then convert 3 molecules of malonyl-CoA into one molecule of phloroglucinol. Additionally, as phloroglucinol is more oxidized than dextrose and other sugars additional modifications may be made to reduce acitivity and flux through the citric acid (TCA) cycle. When more reduced feedstocks are used and more oxidized products are made, more than enough electrons are generated through glycolysis for maintenance energy and production needs. Flux through the citric acid cycle can lead to wasted carbon and lower yields. Genetic modifications to reduce flux through the TCA cycle can include genetic modifications to key steps such as those aimed to reduce activity or expression of the citrate synthase enzyme ecoded by the gltA gene, alternatively enzymes that lead to oxaloacetate production can be reduced or eiliminated such as phophoenolpyruvate carboxylase (such as encoded by the ppc gene) or phosphoenolpyruvate carboxykinase such as encoded by the pck genes. Alternatively genetic modifications may be introduced to cause temperature sensitive (“ts”) activity in these enzymes (such as in the genes gltA, ppc, pck) to low activity at a permissive temeperature such as 30 degrees Celsius, but no activity at a nonpermissive temperature such as 37 degrees Celsius. These “ts” mutants enable a controllable decrease in TCA flux upon temperature change. Numerous temperature sensitive alleles are known for many enzymes such as gltA, and in general methods for screening mutant libraries for such mutations are known in the art, as are more directed approaches for engineering these ts mutations denovo. (Ben-Aroya, S., Coombes, C., Kwok, T., O'Donnell, K. A., Boeke, J. D., and Hieter, P. (2008) Molecular Cell 30:248-258.)

### Example 46

### Production of More Oxidized Products from Malonyl-CoA

[0690] This example describes chemical product production in E. coli from sugar feedstocks for chemicals more oxidized than sugar. Briefly, genetically modified E. coli with controlled inhibition of fatty acid production can be constructed as described in any of the above examples. Any of these strains may be used as starting points for further genetic modifications. Vectors and tools are well known in the art for introducing further genetic modifications, as are promoter systems allowing for controlled or constitutive gene expression. Genes encoding pathway enzymes can be used to introduce activities into genetically modified organisms that can then convert molecules of malonyl-CoA into numerous chemical products. Additionally, as these products are more oxidized than dextrose and other sugars additional modifications may be made to reduce acitivty and flux through the citric acid (TCA) cycle. When more reduced feedstocks are used and more oxidized products are made, more than enough electrons aregenerated through glycolysis for maintenance energy and production needs. Flux through the citric acid cycle can lead to wasted carbon and lower yields. Genetic modifications to reduce flux through the TCA cycle can include genetic modifications to key steps such as those aimed to reduce activity or expression of the citrate synthase enzyme such as encoded by the gltA gene, alternatively enzymes that lead to oxaloacetate production can be reduced or eliminated such as by disruption of phophoenolpyruvate carboxylase (such as encoded by the ppc) gene or phosphoenolpyruvate carboxykinase such as encoded by the pck genes. Alternatively genetic modifications may be introduced to cause temperature sensitive activity in these enzymes (such as gltA, ppc, pck) to low activity at a permissive temeperature such as 30 degrees Celsius, but no activity at a nonpermissive temperature such as 37 degrees Celsius. These temperature sensitive (“ts”) mutants enable a controllable decrease in TCA flux upon temperature change.

### Example 47

### Polyhydroxybutyrate Production with Fatty Acid Synthase Inhibition from Malonyl-CoA

[0691] This example describes polyhydroxybutyrate production in E. coli by expression of malonyl-CoA dependent acetoacetyl-CoA synthetase. Briefly, genetically modified E. coli with controlled fatty acid inhibition can be constructed as described in any of the above examples. Any of these strains may be used as starting points for further genetic modifications. Vectors and tools are well known in the art for introducing further genetic modifications, as are promoter systems allowing for controlled or constitutive gene expression. A gene encoding acetoacetyl-CoA synthase activity such as the nphT7 gene from Streptomyces species may be used to produce acetoacetyl-CoA from 1 molecule of acetyl-CoA and 1 molecule of malonyl-CoA. This irreversible reaction can be ensured to accumulate acetoacetyl-CoA pools in E. coli with the additional deletion of the atoB gene encoding an aceto-acetyl-CoA thiolase, which can degrade acetoacetyl-CoA into two molecules of acetyl-CoA. Acetoacetyl-CoA can in turn be converted to (R)-3-hydroxybutyryl-CoA via the action of an NADPH dependent (R)-3-hydroxybutyryl-CoA dehydrogenase, such as that encoded by the phaB gene of Rhodobacter spaeroides or Cuprivdus Necator. (R)-3-hydroxybutyryl-CoA can be polymerized by the actions of a polyhydroxybutyrate polymerase, such as those encoded by the phaC gene from Cupriavidus necator, to form polyhydroxybutyrate.

### Example 48

### General Example of Genetic Modification to a Host Cell

[0692] In addition to the above specific examples, this example is meant to describe a non-limiting approach to genetic modification of a selected microorganism to introduce a nucleic acid sequence of interest. Alternatives and variations are provided within this general example. The methods of this example are conducted to achieve a combination of desired genetic modifications in a selected microorganism species, such as a combination of genetic modifications as described in sections herein, and their functional equivalents, such as in other bacterial and other microorganism species.

[0693] A gene or other nucleic acid sequence segment of interest is identified in a particular species (such as E. coli as described herein) and a nucleic acid sequence comprising that gene or segment is obtained.

[0694] Based on the nucleic acid sequences at the ends of or adjacent the ends of the segment of interest, 5′ and 3′ nucleic acid primers are prepared. Each primer is designed to have a sufficient overlap section that hybridizes with such ends or adjacent regions. Such primers may include enzyme recognition sites for restriction digest of transposase insertion that could be used for subsequent vector incorporation or genomic insertion. These sites are typically designed to be outward of the hybridizing overlap sections. Numerous contract services are known that prepare primer sequences to order (e.g., Integrated DNA Technologies, Coralville, Iowa USA).

[0695] Once primers are designed and prepared, polymerase chain reaction (PCRn) is conducted to specifically amplify the desired segment of interest. This method results in multiple copies of the region of interest separated from the microorganism's genome. The microorganism's DNA, the primers, and a thermophilic polymerase are combined in a buffer solution with potassium and divalent cations (e.g., Mg or Mn) and with sufficient quantities of deoxynucleoside triphosphate molecules. This mixture is exposed to a standard regimen of temperature increases and decreases. However, temperatures, components, concentrations, and cycle times may vary according to the reaction according to length of the sequence to be copied, annealing temperature approximations and other factors known or readily learned through routine experimentation by one skilled in the art.

[0696] In an alternative embodiment the segment of interest may be synthesized, such as by a commercial vendor, and prepared via PCRn, rather than obtaining from a microorganism or other natural source of DNA.

[0697] The nucleic acid sequences then are purified and separated, such as on an agarose gel via electrophoresis. Optionally, once the region is purified it can be validated by standard DNA sequencing methodology and may be introduced into a vector. Any of a number of vectors may be used, which generally comprise markers known to those skilled in the art, and standard methodologies are routinely employed for such introduction. Commonly used vector systems are pSMART (Lucigen, Middleton, Wis. USA), pET E. coli EXPRESSION SYSTEM (Stratagene, La Jolla, Calif. USA), pSC-B StrataClone Vector (Stratagene, La Jolla, Calif. USA), pRANGER-BTB vectors (Lucigen, Middleton, Wis. USA), and TOPO vector (Invitrogen Corp, Carlsbad, Calif., USA). Similarly, the vector then is introduced into any of a number of host cells. Commonly used host cells are E. coli 10G (Lucigen, Middleton, Wis. USA), E. coli 10GF′ (Lucigen, Middleton, Wis. USA), StrataClone Competent cells (Stratagene, La Jolla, Calif. USA), E. coli BL21, E. coli BW25113, and E. coli K12 MG1655. Some of these vectors possess promoters, such as inducible promoters, adjacent the region into which the sequence of interest is inserted (such as into a multiple cloning site), while other vectors, such as pSMART vectors (Lucigen, Middleton, Wis. USA), are provided without promoters and with dephosphorylated blunt ends. The culturing of such plasmid-laden cells permits plasmid replication and thus replication of the segment of interest, which often corresponds to expression of the segment of interest.

[0698] Various vector systems comprise a selectable marker, such as an expressible gene encoding a protein needed for growth or survival under defined conditions. Common selectable markers contained on backbone vector sequences include genes that encode for one or more proteins required for antibiotic resistance as well as genes required to complement auxotrophic deficiencies or supply critical nutrients not present or available in a particular culture media. Vectors also comprise a replication system suitable for a host cell of interest.

[0699] The plasmids containing the segment of interest can then be isolated by routine methods and are available for introduction into other microorganism host cells of interest. Various methods of introduction are known in the art and can include vector introduction or genomic integration. In various alternative embodiments the DNA segment of interest may be separated from other plasmid DNA if the former will be introduced into a host cell of interest by means other than such plasmid.

[0700] While steps of this general example involve use of plasmids, other vectors known in the art may be used instead. These include cosmids, viruses (e.g., bacteriophage, animal viruses, plant viruses), and artificial chromosomes (e.g., yeast artificial chromosomes (YAC) and bacteria artificial chromosomes (BAC)).

[0701] Host cells into which the segment of interest is introduced may be evaluated for performance as to a particular enzymatic step such as regarding biosynthesis of a chemical compound of interest. Selections of better performing genetically modified host cells may be made, selecting for overall performance, tolerance, or production or accumulation of the chemical of interest.

[0702] It is noted that this procedure may incorporate a nucleic acid sequence for a single gene (or other nucleic acid sequence segment of interest), or multiple genes (under control of separate promoters or a single promoter), and the procedure may be repeated to create the desired heterologous nucleic acid sequences in expression vectors, which are then supplied to a selected microorganism so as to have, for example, a desired complement of enzymatic conversion step functionality for any of the herein-disclosed metabolic pathways. However, it is noted that although many approaches rely on expression via transcription of all or part of the sequence of interest, and then translation of the transcribed mRNA to yield a polypeptide such as an enzyme, certain sequences of interest may exert an effect by means other than such expression.

[0703] The specific laboratory methods used for these approaches are well-known in the art and may be found in various references known to those skilled in the art, such as Sambrook and Russell, Molecular Cloning: A Laboratory Manual, 3^{rd} Ed., (2001) (Volumes 1-3), Cold Spring Harbor Laboratory Press, Cold Spring Harbor, N.Y. (hereinafter, Sambrook and Russell, 2001).

[0704] As an alternative to the above, other genetic modifications may also be practiced, such as a deletion of a nucleic acid sequence of the host cell's genome. One non-limiting method to achieve this is by use of Red/ET recombination, known to those of ordinary skill in the art and described in U.S. Pat. Nos. 6,355,412 and 6,509,156, issued to Stewart et al. and incorporated by reference herein for its teachings of this method. Material and kits for such method are available from Gene Bridges (Gene Bridges GmbH, Heidelberg, Germany), and the method may proceed by following the manufacturer's instructions. Targeted deletion of genomic DNA may be practiced to alter a host cell's metabolism so as to reduce or eliminate production of undesired metabolic products. This may be used in combination with other genetic modifications such as described herein in this general example.

### Example 49

### Preparing a Genetically Modified E. coli Host Cell Comprising Malonyl-CoA-Reductase (Mcr) in Combination with Other Genetic Modifications to Increase 3-HP Production Relative to a Control E. coli Cell

[0705] Genetic modifications are made to introduce a vector comprising mmsB such as from Pseudomonas auruginos, which further is codon-optimized for E. coli. Vectors comprising galP and a native or mutated ppc also may be introduced by methods known to those skilled in the art (see, e.g., Sambrook and Russell, 2001), additionally recognizing that mutations may be made by a method using the XLI-Red mutator strain, using appropriate materials following a manufacturer's instructions (Stratagene QuikChange Mutagenesis Kit, Stratagene, La Jolla, Calif. USA) and selected for or screened under standard protocols.

[0706] Also, genetic modifications are made to reduce or eliminate the enzymatic activities of E. coli genes as desired. These genetic modifications are achieved by using the RED/ET homologous recombination method with kits supplied by Gene Bridges (Gene Bridges GmbH, Heidelberg, Germany) according to manufacturer's instructions.

[0707] Also, in some embodiments genetic modifications are made to increase the NADPH cellular pool. Non-limiting examples of some targets for genetic modification are provided herein. These are pgi (in a mutated form), pntAB, overexpressed, gapA:gapN substitution/replacement, and disrupting or modifying a soluble transhydrogenase such as sthA, and genetic modifications of one or more of zwf, gnd, and edd.

[0708] The so-genetically modified microorganism of any such engineered embodiment is evaluated and found to exhibit higher productivity of 3-HP compared with a control E. coli lacking said genetic modifications. Productivity is measured by standard metrics, such as volumetric productivity (grams of 3-HP/hour) under similar culture conditions.

### Example 50

### Polyketide Production Via Malonyl-coA in Strains with Combinations of FAS Mutations

[0709] The following genetically modified E. coli strains (listed in Table 36) were constructed form a wild type BW25113 starting host. E. coli BW25113 was obtained from the Yale genetic stock center (New Haven, Conn., USA). These strains were constructed by standard methods such as discussed in the Common Methods Section and also known in the art as referenced above. Briefly, chromosomal modifications were constructed via homologous recombination.

TABLE 36
Strain List 1

| Strain | Chromosomal genotype | Plasmid 1 | Plasmid 2 |
|---|---|---|---|
| 1 | F-, Δ(araD-araB)567, | Ptrc-THNS | NA |
| | ΔlacZ4787(::rrnB-3), LAM-, | | |
| | rph-1, Δ(rhaD-rhaB)568, | | |
| | hsdR514 | | |
| 2 | F-, Δ(araD-araB)567, | Ptrc-THNS | pACYC- |
| | ΔlacZ4787(::rrnB-3), LAM-, | | accABCD |
| | rph-1, Δ(rhaD-rhaB)568, | | |
| | hsdR514 | | |
| 3 | F-, Δ(araD-araB)567, | Ptrc-THNS | NA |
| | ΔlacZ4787(::rrnB-3), | | |
| | LAM-, rph-1, Δ(rhaD- | | |
| | rhaB)568, hsdR514, | | |
| | ΔldhA:frt, ΔpflB:frt, | | |
| | mgsA:frt, ΔpoxB:frt, | | |
| | F-, Δpta-ack:frt | | |
| 4 | F-, Δ(araD-araB)567, | Ptrc-THNS | pACYC- |
| | Δ1acZ4787(::rrnB-3), | | accABCD |
| | LAM-, rph-1, Δ(rhaD- | | |
| | rhaB)568, hsdR514, | | |
| | Δ1dhA:frt, ΔpflB:frt, | | |
| | mgsA:frt, ΔpoxB:frt, | | |
| | Δpta-ack:frt | | |
| 5 | F-, Δ(araD-araB)567, | Ptrc-THNS | NA |
| | Δ1acZ4787(::rrnB-3), | | |
| | LAM-, rph-1, Δ(rhaD- | | |
| | rhaB)568, hsdR514, | | |
| | ΔldhA:frt, ΔpflB:frt, | | |
| | mgsA:frt, ΔpoxB:frt, Δpta- | | |
| | ack:frt, fabIts | | |
| | (S241F)-zeoR | | |
| 6 | F-, Δ(araD-araB)567, | Ptrc-THNS | pACYC- |
| | Δ1acZ4787(::rrnB-3), | | accABCD |
| | LAM-, rph-1, Δ(rhaD- | | |
| | rhaB)568, hsdR514, | | |
| | Δ1dhA:frt, ΔpflB:frt, | | |
| | mgsA:frt, ΔpoxB:frt, | | |
| | Δpta-ack:frt, fabIts | | |
| | (S241F)-zeoR | | |
| 7 | F-, Δ(araD-araB)567, | Ptrc-THNS | NA |
| | ΔlacZ4787(::rrnB-3), | | |
| | LAM-, rph-1, Δ(rhaD- | | |
| | rhaB)568, hsdR514, | | |
| | ΔldhA:frt, ΔpflB:frt, | | |
| | mgsA:frt, ΔpoxB:frt, | | |
| | Δpta-ack:frt, fabIts | | |
| | (S241F)-zeoR, fabBts | | |
| | (A329V) | | |
| 8 | F-, Δ(araD-araB)567, | Ptrc-THNS | pACYC- |
| | ΔlacZ4787(::rrnB-3), | | accABCD |
| | LAM-, rph-1, Δ(rhaD- | | |
| | rhaB)568, hsdR514, | | |
| | ΔldhA:frt, ΔpflB:frt, | | |
| | mgsA:frt, ΔpoxB:frt | | |
| | Δpta-ack:frt, fabIts | | |
| | (S241F)-zeoR, fabBts | | |
| | (A329V) | | |
| 9 | F-, Δ(araD-araB)567, | Ptrc-THNS | NA |
| | ΔlacZ4787(::rrnB-3), | | |
| | LAM-, rph-1, Δ(rhaD- | | |
| | rhaB)568, hsdR514, | | |
| | ΔldhA:frt, ΔpflB:frt, | | |
| | mgsA:frt, ΔpoxB:frt, Δpta- | | |
| | ack:frt, fabIts | | |
| | (S241F)-zeoR, MabF | | |
| 10 | F-, Δ(araD-araB)567, | Ptrc-THNS | pACYC- |
| | ΔlacZ4787(::rrnB-3), | | accABCD |
| | LAM-, rph-1, Δ(rhaD- | | |
| | rhaB)568, hsdR514, | | |
| | ΔldhA:frt, ΔpflB:frt, | | |
| | mgsA:frt, ΔpoxB:frt, Δpta- | | |
| | ack:frt, fabIts | | |
| | (S241F)-zeoR, MabF | | |
| 11 | F-, Δ(araD-araB)567, | Ptrc-THNS | NA |
| | Δ1acZ4787(::rrnB-3), | | |
| | LAM-, rph-1, Δ(rhaD- | | |
| | rhaB)568, hsdR514, | | |
| | ΔldhA:frt, ΔpflB:frt, | | |
| | mgsA:frt, ΔpoxB:frt, | | |
| | Δpta-ack:frt, fabIts | | |
| | (S241F)-zeoR, ΔfabF, | | |
| | fabBts (A329V) | | |
| 12 | F-, Δ(araD-araB)567, | Ptrc-THNS | pACYC- |
| | ΔlacZ4787(::rrnB-3), | | accABCD |
| | LAM-, rph-1, Δ(rhaD- | | |
| | rhaB)568, hsdR514,, | | |
| | ΔldhA:frt, ΔpflB:frt, | | |
| | mgsA:frt, ΔpoxB:frt, | | |
| | Δpta-ack:frt, fabIts | | |
| | (S241F)-zeoR, ΔfabF, | | |
| | fabBts (A329V) | | |

[0710] The above strains were evaluated in shake flasks for the production of flaviolin. Triplicate evaluations were performed. Briefly, overnight starter cultures were made in 50 mL of Luria Broth including the appropriate antibiotics and incubated 16-24 hours are 30° C., while shaking at 225 rpm. These cultures were used to inoculate 3×50 mL cultures of each strain in SM8 minimal medium with 5% culture as starting inoculum, antibiotics, and 1 mM IPTG. Flasks were grown in the 30° C. in a shaking incubator. At 24 hours, samples were taken for analyses of OD at 600 nm and absorbance at 340 nm, the latter an indicator of the presence of flaviolin.

### Example 51

### 3-HP Production Via Malonyl-coA in Strains with Additional Combinations of FAS Mutations

[0711] The following genetically modified E. coli strains (listed in Table 37) were constructed from a wild type BW25113 starting host. E. coli BW25113 was obtained from the Yale genetic stock center (New Haven, Conn. USA). These strains were constructed by standard methods such as discussed in the Common Methods Section and also known in the art as referenced above. Briefly, chromosomal modifications were constructed via homologous recombination.

TABLE 37
Strain List 2

| Strain | Chromosomal genotype | Plasmid 1 | Plasmid 2 |
|---|---|---|---|
| 240 | F-, Δ(araD-araB)567, | Ptrc-mcr | pACYC- |
| | ΔlacZ4787(::rrnB-3), | | accABCD- |
| | LAM-, rph-1, Δ(rhaD- | | pntAB |
| | rhaB)568, hsdR514, | | |
| | ΔldhA:frt, ΔpflB:frt, | | |
| | mgsA:frt, ΔpoxB:frt, | | |
| | Δpta-ack:frt, fabIts | | |
| | (S241F)-zeoR | | |
| 470 | F-, Δ (araD-araB)567, | Ptrc-mcr | NA |
| | ΔlacZ4787(::rrnB-3), | | |
| | LAM-, rph-1, Δ(rhaD- | | |
| | rhaB)568, hsdR514, | | |
| | ΔldhA:frt, ΔpflB:frt, | | |
| | mgsA:frt, ΔpoxB:frt, | | |
| | Δpta-ack:frt, fabIts | | |
| | (S241F)-zeoR, ΔfabF, | | |
| | fabB(ts) | | |
| 471 | F-, Δ(araD-araB)567, | Ptrc-mcr | pACYC- |
| | ΔlacZ4787(::rrnB-3), | | accABCD |
| | LAM-, rph-1, Δ(rhaD- | | |
| | rhaB)568, hsdR514, | | |
| | ΔldhA:frt, ΔpflB:frt, | | |
| | mgsA:frt, ΔpoxB:frt, | | |
| | Δpta-ack:frt, fablts | | |
| | (S241F)-zeoR, ΔfabF, | | |
| | fabB(ts) | | |
| 472 | F-, Δ(araD-araB)567, | Ptrc-mcr | pACYC- |
| | ΔlacZ4787(::rrnB-3), | | accABCD- |
| | LAM-, rph-1, Δ(rhaD- | | pntAB |
| | rhaB)568, hsdR514, | | |
| | ΔldhA:frt, ΔpflB:frt, | | |
| | mgsA:frt, ΔpoxB:frt, | | |
| | Δpta-ack:frt, fabIts | | |
| | (S241F)-zeoR, ΔfabF, | | |
| | fabB(ts) | | |
| 473 | F-, Δ(araD-araB)567, | Ptrc-mcr | pACYC-CAT- |
| | ΔlacZ4787(::rrnB-3), | | accADBC- |
| | LAM-, rph-1, Δ(rhaD- | | udhA |
| | rhaB)568, hsdR514,, | | |
| | ΔldhA:frt, ΔpflB:frt, | | |
| | mgsA:frt, ΔpoxB:frt, | | |
| | Δpta-ack:frt, fabIts | | |
| | (S241F)-zeoR, ΔfabF, | | |
| | fabB(ts) | | |
| 474 | F-, Δ(araD-araB)567, | Ptrc-mcr | pBT3-tpiA- |
| | ΔlacZ4787(::rrnB-3), | | pntAB |
| | LAM-, rph-1, Δ (rhaD- | | |
| | rhaB)568, hsdR514, | | |
| | ΔldhA:frt, ΔpflB:frt, | | |
| | mgsA:frt, ΔpoxB:frt, | | |
| | Δpta-ack:frt, fabIts | | |
| | (S241F)-zeoR, ΔfabF, | | |
| | fabB(ts) | | |

[0712] The above strains were evaluated in shake flasks for the production of 3-HP. Triplicate evaluations were performed. Briefly, overnight starter cultures were made in 50 mL of Luria Broth including the appropriate antibiotics and incubated 16-24 hours are 30° C., while shaking at 225 rpm. These cultures were used to inoculate 3×50 mL cultures of each strain in SM8 minimal medium with 5% culture as the starting inoculum, antibiotics, and 1 mM IPTG. Flasks were grown at 30° C. in a shaking incubator. At 4, 8, 10, 12 and 24 hours, samples were taken for analyses of OD at 600 nm and 3-HP production using the 3-HP bioassay described in the Common Methods Section.

TABLE 38
Specific 3-HP Production of FAS mutants

Average Specific Productivity
(g 3-HP/gDCW-hr)

| Strain | 8 hrs | 10 hrs | 12 hrs | 24 hrs |
|---|---|---|---|---|
| 240 | 0.0622887 | 0.10102 | 0.2004337 | 0.147062 |
| 472 | 0.0264916 | 0.17765 | 0.2737726 | 0.166645 |

### Example 52

### 3-HP Production Via Malonyl-coA in Strains with Additional Combinations of FAS Mutations

[0713] The following genetically modified E. coli strains (listed in Table 39) were constructed form a wild type BW25113 starting host. E. coli BW25113 was obtained from the Yale genetic stock center. These strains were constructed by standard methods discussed in the Common Methods Section and also known in the art as referenced above. Briefly, chromosomal modifications were constructed via homologous recombination.

TABLE 39
Strain List 3

| | Chromosomal | | |
|---|---|---|---|
| Strain | genotype | Plasmid 1 | Plasmid 2 |
| 240 | F-, Δ(araD-araB)567, | Ptrc-mcr | pACYC- |
| | ΔlacZ4787(::rrnB-3), | | accABCD- |
| | LAM-, rph-1, Δ | | pntAB |
| | (rhaD- rhaB)568, | | |
| | hsdR514, ΔldhA:frt, | | |
| | ΔpflB:frt, mgsA:frt, | | |
| | ΔpoxB:frt, Δpta- | | |
| | ack:frt, fabIts | | |
| | (S241F)-zeoR | | |
| 465 | F-, Δ (araD-araB)567, | Ptrc-mcr | NA |
| | ΔlacZ4787(::rrnB-3), | | |
| | LAM-, rph-1, | | |
| | Δ(rhaD- rhaB)568, | | |
| | hsdR514,, | | |
| | ΔldhA:frt, ΔpflB:frt, | | |
| | mgsA:frt, ΔpoxB:frt, | | |
| | Δpta-ack:frt, fabIts | | |
| | (S241F)-zeoR, | | |
| | ΔfabF | | |
| 466 | F-, Δ (araD-araB)567, | Ptrc-mcr | pACYC- |
| | ΔlacZ4787(::rrnB-3), | | accABCD |
| | LAM-, rph-1, Δ | | |
| | (rhaD-rhaB)568, | | |
| | hsdR514,, ΔldhA:frt, | | |
| | ΔpflB:frt, mgsA:frt, | | |
| | ΔpoxB:frt, Δpta- | | |
| | ack:frt, fablts | | |
| | (S241F)-zeoR, ΔfabF | | |
| 467 | F-, Δ (araD-araB)567, | Ptrc-mcr | pACYC- |
| | ΔlacZ4787(::rrnB-3), | | accABCD- |
| | LAM-, rph-1, | | pntAB |
| | Δ(rhaD- | | |
| | rhaB)568, hsdR514,, | | |
| | ΔldhA:frt, ΔpflB:frt, | | |
| | mgsA:frt, ΔpoxB:frt, | | |
| | Δpta-ack:frt, fablts | | |
| | (S241F)-zeoR, | | |
| | ΔfabF | | |
| 468 | F-, Δ (araD-araB)567, | Ptrc-mcr | pACYC-CAT- |
| | ΔlacZ4787(::rrnB-3), | | accADBC- |
| | LAM-, rph-1, | | udhA |
| | Δ(rhaD-rhaB)568, | | |
| | hsdR514,, ΔldhA:frt, | | |
| | ΔpflB:frt, mgsA:frt, | | |
| | ΔpoxB:frt, Δpta- | | |
| | ack:frt, fablts | | |
| | (S241F)-zeoR, ΔfabF | | |
| 469 | F-, Δ (araD-araB)567, | Ptrc-mcr | pBT3-tpiA- |
| | ΔlacZ4787(::rrnB-3), | | pntAB |
| | LAM-, rph-1, Δ(rhaD- | | |
| | rhaB)568, hsdR514,, | | |
| | ΔldhA:frt, ΔpflB:frt, | | |
| | mgsA:frt, ΔpoxB:frt, | | |
| | Δpta-ack:frt, fabIts | | |
| | (S241F)-zeoR, ΔfabF | | |

[0714] The above strains were evaluated in shake flasks for the production of 3-HP. Triplicate evaluations were performed. Briefly, overnight starter cultures were made in 50 mL of Luria Broth including the appropriate antibiotics and incubated 16-24 hours are 30° C., while shaking at 225 rpm. These cultures were used to inoculate 3×50 mL cultures of each strain in SM8 minimal medium with 5% culture, antibiotics, and 1 mM IPTG. Flasks were grown in the 30° C. in shaking incubator, at 4, 8, 10, 12 and 24 hours, samples were taken for analyses of OD at 600 nm and 3-HP production using the 3-HP bioassay described in the general methods section.

TABLE 40
Specific 3-HP Production of FAS mutants.

Average Specific Productivity
(g 3-HP/gDCW-hr)

| Strain | 8 hrs | 10 hrs | 12 hrs | 24 hrs |
|---|---|---|---|---|
| 240 | 0.0622887 | 0.10102 | 0.2004337 | 0.147062 |
| 467 | 0.0741601 | 0.17242 | 0.2229593 | 0.126147 |

### Example 53

### Polyketide Production Via a FAS and CoA Synthesis Mutant Strains

[0715] The following genetically modified E. coli strains (listed in Table 41) were constructed form a wild type BW25113 starting host. E. coli BW25113 was obtained from the Yale genetic stock center (New Haven, Conn. USA). These strains were constructed by standard methods discussed in the Common Methods Section and also known in the art as referenced above. Briefly, chromosomal modifications were constructed via homologous recombination.

TABLE 41
Strain List 4

| | Chromosomal | | |
|---|---|---|---|
| Strain | genotype | Plasmid 1 | Plasmid 2 |
| 6 | F-, Δ(araD-araB)567, | Ptrc-THNS | pACYC- |
| | ΔlacZ4787(::rrnB-3), | | accABCD |
| | LAM-, rph-1, Δ(rhaD- | | |
| | rhaB)568, | | |
| | hsdR514,, | | |
| | ΔldhA:frt, ΔpflB:frt, | | |
| | mgsA:frt, | | |
| | ΔpoxB:frt, Δpta- | | |
| | ack:frt, fabIts | | |
| | (S241F)-zeoR | | |
| M1 | F-, Δ(araD-araB)567, | Ptrc-THNS | pACYC- |
| | ΔlacZ4787(::rrnB-3), | | accABCD |
| | LAM-, rph-1, Δ(rhaD- | | |
| | rhaB)568, hsdR514,, | | |
| | ΔldhA:frt, ΔpflB:frt, | | |
| | mgsA:frt, ΔpoxB:frt, | | |
| | Δpta-ack:frt, fabIts | | |
| | (S241F)-zeoR, | | |
| | coaA(R106A) | | |
| M2 | F-, Δ(araD-araB)567, | Ptrc-THNS | pACYC- |
| | ΔlacZ4787(::rrnB-3), | | accABCD |
| | LAM-, rph-1, Δ(rhaD- | | |
| | rhaB)568, hsdR514,, | | |
| | ΔldhA:frt, ΔpflB:frt, | | |
| | mgsA:frt, ΔpoxB:frt, | | |
| | Δpta-ack:frt, fabIts | | |
| | (S241F)-zeoR, | | |
| | coaA(R106A) | | |

[0716] The above strains were evaluated in shake flasks for the production of flaviolin. Triplicate evaluations were performed. Briefly, overnight starter cultures were made in 50 mL of Luria Broth including the appropriate antibiotics and incubated 16-24 hours are 30° C., while shaking at 225 rpm. These cultures were used to inoculate 3×50 mL cultures of each strain in SM8 minimal medium with 5% culture, antibiotics, and 1 mM IPTG with or without 40 uM pantothenic acid. Flasks were grown in the 30° C. in shaking incubator; at 24 hours, samples were taken for analyses of OD at 600 nm and absorbance at 340 nm.

### Example 54

### 3-HP Production Via FAS Mutant Strains

[0717] The following genetically modified E. coli strains (listed in Table 42) were constructed form a wild type BW25113 starting host. E. coli BW25113 was obtained from the Yale genetic stock center. These strains were constructed by standard methods discussed in the Common Methods Section and also known in the art as referenced above. Briefly, chromosomal modifications were constructed via recombination. Alternatively strains including any combination of fabI, fabB, fabF and or fabD mutations may be constructed and or evaluated.

TABLE 42
Strain List 5

| Strain | Chromosomal genotype | Plasmid 1 | Plasmid 2 |
|---|---|---|---|
| 240 | F-, Δ(araD-araB)567, | Ptrc-mcr | pACYC- |
| | ΔlacZ4787(::rrnB-3), | | accABCD- |
| | LAM-, rph-1, Δ(rhaD- | | pntAB |
| | rhaB)568, hsdR514,, | | |
| | ΔldhA:frt, ΔpflB:frt, | | |
| | mgsA:frt, ΔpoxB:frt, | | |
| | Δpta-ack:frt, fabIts | | |
| | (S241F)-zeoR | | |
| M5 | F-, Δ(araD-araB)567, | Ptrc-mcr | NA |
| | ΔlacZ4787(::rrnB-3), | | |
| | LAM-, rph-1, Δ(rhaD- | | |
| | rhaB)568, hsdR514,, | | |
| | ΔldhA:frt, ΔpflB:frt, | | |
| | mgsA:frt, ΔpoxB:frt, | | |
| | Δpta-ack:frt, fabIts | | |
| | (S241F)-zeoR, fabD(ts) | | |
| M6 | F-, Δ(araD-araB)567, | Ptrc-mcr | pACYC- |
| | ΔlacZ4787(::rrnB-3), | | accABCD |
| | LAM-, rph-1, Δ(rhaD- | | |
| | rhaB)568, hsdR514,, | | |
| | ΔldhA:frt, ΔpflB:frt, | | |
| | mgsA:frt, ΔpoxB:frt, | | |
| | Δpta-ack:frt, fabIts | | |
| | (S241F)-zeoR, fabD(ts) | | |
| M7 | F-, Δ(araD-araB)567, | Ptrc-mcr | pACYC- |
| | ΔlacZ4787(::rrnB-3), | | accABCD- |
| | LAM-, rph-1, Δ(rhaD- | | pntAB |
| | rhaB)568, hsdR514,, | | |
| | ΔldhA:frt, ΔpflB:frt, | | |
| | mgsA:frt, ΔpoxB:frt, | | |
| | Δpta-ack:frt, fabIts | | |
| | (S241F)-zeoR, fabD(ts) | | |

[0718] Each of the above strain are evaluated in shake flask experiments for the production of 3-HP using the methods discussed in the above examples.

### Example 55

### Product Production Via Malonyl-coA in Strains with Combinations of FAS Mutations

[0719] In general strains are constructed from a wild type starting host. These strains are constructed by standard methods discussed in the Common Methods Section and also known in the art as referenced above. Chromosomal modifications are constructed via recombination. Strains including any combination of the mutations and modifications disclosed above may be combined, particularly including any combination of enoyl-acyl carrier protein (ACP) reductase (such as fabIi), β-ketoacyl-acyl carrier protein synthase I (such as fabB), β-ketoacyl-acyl carrier protein synthase II (such as fabF), and malonyl-CoA-acyl carrier protein transacylase (such as fabD) and or pantothenate kinase (such as coaA) mutations may be constructed and/or evaluated with or without the supplementation of pantothenate to the media.

### Example 56

### Example of 3-HP Production

[0720] An inoculum of a genetically modified microorganism that possesses a 3-HP production pathway and other genetic modifications as described above is provided to a culture vessel to which also is provided a liquid media comprising nutrients at concentrations sufficient for a desired bio-process culture period.

[0721] The final broth (comprising microorganism cells, largely ‘spent’ media and 3-HP, the latter at concentrations, in various embodiments, exceeding 1, 2, 5, 10, 30, 50, 75 or 100 grams/liter) is collected and subjected to separation and purification steps so that 3-HP is obtained in a relatively purified state. Separation and purification steps may proceed by any of a number of approaches combining various methodologies, which may include centrifugation, concentration, filtration, reduced pressure evaporation, liquid/liquid phase separation (including after forming a polyamine-3-HP complex, such as with a tertiary amine such as CAS#68814-95-9, Alamine® 336, a triC8-10 alkyl amine (Cognis, Cincinnati, Ohio USA), membranes, distillation, evaporation, and/or other methodologies. Principles and details of standard separation and purification steps are known in the art, for example in “Bioseparations Science and Engineering,” Roger G. Harrison et al., Oxford University Press (2003), and Membrane Separations in the Recovery of Biofuels and Biochemicals—An Update Review, Stephen A. Leeper, pp. 99-194, in Separation and Purification Technology, Norman N. Li and Joseph M. Cabo, Eds., Marcel Dekker (1992), incorporated herein for such teachings. The particular combination of methodologies is selected from those described herein, and in part is based on the concentration of 3-HP and other components in the final broth.

[0722] Similar culture procedures may be applied for other chemical products disclosed herein.

### Example 57

### Induction of Malonyl-CoA Reductase by Fermentation Under Low-Phosphate Conditions

[0723] Plasmid maps are shown in the Figures. Plasmid 1 was digested with NcoI/Bst1107. A fragment size of 7059 bases was excised from a gel and purified (SEQ ID NO:168). The target promoter sequence was ordered (Integrated DNA Technologies, Coralville, Iowa USA) including with modifications to the native ribosome binding site and subsequently changed to be compatible with existing expression vectors and to accommodate expression of key downstream gene(s) within the vector(s), in this example malonyl CoA reductase (MCR, mcr). Plasmid 2, synthesized by (Integrated DNA Technologies, Coralville, Iowa USA) to comprise this low-phosphate promoter (see discussion above regarding SEQ ID NOs: 210 and 211), was digested with NcoI/PmlI. A fragment size of 156 bases was excised from a gel and purified, this fragment is the pYibD promoter (SEQ ID NO:210). Fragments were ligated overnight using T4 DNA ligase to create Plasmid 3, identified as pTrc-P_{yibD}-mcr (SEQ ID NO:170).

[0724] The pTrc_PyibD-mcr plasmid was evaluated by the standard shake flask protocol with variable phosphate levels.

### Example 58

### Fermentation Events Using Strain 547

[0725] Strain 547 was prepared using molecular biology techniques described elsewhere herein, including use of homologous recombination to introduce and/or replace portions of the genome and construction and introduction of plasmids.

TABLE 43
Strain List 6

| | Chromosomal | | |
|---|---|---|---|
| Strain | genotype | Plasmid 1 | Plasmid 2 |
| 547 | F-, Δ(araD-araB)567, | pTRC-PyibD- | pACYC-Ptal- |
| | ΔlacZ4787(::rrnB-3), | mcr | pntAB-Ptpia- |
| | LAM-, rph-1, Δ(rhaD- | | accAD-PrpiA- |
| | rhaB)568, hsdR514, | | accCD |
| | ΔldhA:frt, ΔpflB:frt, | | |
| | ΔmgsA:frt, | | |
| | ΔpoxB:frt, Δpta- | | |
| | ack:frt, fabIts | | |
| | (S241F)-zeoR, | | |
| | fabB(ts), ΔfabF:frt, | | |
| | coaA*, fabD(ts), | | |
| | ΔaceBAK:frt | | |

[0726] This strain was then evaluated under various fermentations conditions that modulated or otherwise controlled temperature, pH, oxygen concentration, glucose feed rate and concentration, and other media conditions. Among the parameters used to determine other process steps, low ambient phosphate concentration was used as a control point that lead to temperature shift from approximately 30° C. to approximately 37° C. As noted elsewhere, a promoter sensitive to low ambient phosphate was utilized to control expression of the gene encoding malonyl-CoA reductase in the plasmid identified as pTrc-P_{yibD}-mcr. Also, during one or more evaluations, any one or more of dissolved oxygen, redox potential, aeration rate, agitation rate, oxygen transfer rate, and oxygen utilization rate was/were used to control the system and/or measured.

[0727] Strain BX3_{—}547 was evaluated for 36 fermentation events that were conducted over an 8 week period using FM11 medium (described in the Common Methods Section). The duration of the fermentation events were all less than approximately 80 hours, of which a portion was after temperature increase to effectively reduce enzymatic activity of fabI(ts), fabB(ts), and fabD(ts).

[0728] Overall the results demonstrated microbial performance over a range of reduced oxygen conditions, with final 3-HP titers ranging between 50 and 62 grams of 3-HP/liter of final culture media volume. It is appreciated that the P_{yibD} promoter, or a similar low-phosphate induction promoter, could be utilized in a genetic construct to induce any one or more of the sequences described and/or taught herein, so as to enable production of any other of the chemical products disclosed herein, including in the other examples above.

### Example 59

### 3HP Production Via Malonyl-coA in Strains with Combinations of Changes to Increase Pyruvate Dehydrogenase Activity and Reduce Pathway Inhibition

[0729] A strong constitutive promoter, PT5 from the bacteriophage T5 (SEQ ID NO:171), was cloned upstream of the pyruvate dehydrogenase (PDH) operon (aceEF, lpd) on a plasmid using standard molecular biology techniques described elsewhere herein. The entire operon (T5 aceEF-lpd) (SEQ ID NO: 172) was inserted into the puuC locus of E. coli deleting the native puuC coding sequence by using homologous recombination techniques to introduce and/or replace portions of the genome described elsewhere herein. This insertion creates a strain with two chromosomal copies of the PDH operon: one of which is transcribed by the native PDH promoter and one that is transcribed by the strong T5 promoter. In addition a mutation was made in some strains (see strain list below) in the lpdA (E354K) protein to cause the pyruvate dehydrogenase complex to be less sensitive to NADH inhibition and active during anaerobic growth (Kim et al. (J. Bacterial. 190:3851-3858, 2008). This mutation was made in either copy of lpd and in both copies creating the strains in Table 44.

TABLE 44
Strain List 7

| Strain | Chromosomal genotype | PDH Status |
|---|---|---|
| 775 | F-, Δ(araD-araB)567, ΔlacZ4787(::rrnB-3), LAM-, rph- | aceEF_lpdA = native promoter |
| | 1, Δ(rhaD-rhaB)568, hsdR514, ΔldhA:frt, ΔpflB:frt, | and protein sequence |
| | ΔmgsA:frt, ΔpoxB:frt, Δpta-ack:frt, fabI(ts)-(S241F)- | |
| | zeoR, fabB(ts)-(A329V), ΔfabF:frt, coaA(R106A), | |
| | fabD(ts)-(W257Q), ΔaceBAK:frt, | |
| 770 | F-, Δ(araD-araB)567, ΔlacZ4787(::rrnB-3), LAM-, rph-1, | aceEF_lpdA (E354K) = native |
| | Δ(rhaD-rhaB)568, hsdR514, ΔldhA::frt, ΔpflB::frt, | promoter and mutated lpd |
| | ΔmgsA::frt, ΔpoxB::frt, Δpta-ack::frt, fabI(ts)-(S241F)-zeoR, | |
| | fabB(ts)-(A329V), ΔfabF::frt, coaA(R106A), fabD(ts)- | |
| | (W257Q), ΔaceBAK:frt, lpd(E354K):loxP | |
| 801 | F-, Δ(araD-araB)567, ΔlacZ4787(::rrnB-3), LAM-, rph-1, | aceEF_lpdA = native promoter |
| | Δ(rhaD-rhaB)568, hsdR514, ΔldhA::frt, ΔpflB::frt, | and protein sequence |
| | ΔmgsA::frt, ΔpoxB::frt, Δpta-ack::frt, fabI(ts)-(S241F)-zeoR, | plus-ΔpuuC:T5-aceEF- |
| | fabB(ts)-(A329V), ΔfabF::frt, coaA(R106A), fabD(ts)- | lpd(E354K) |
| | (W257Q), ΔaceBAK:frt, ΔpuuC:T5-aceEF-lpd(E354K):loxP | |
| 803 | F-, Δ(araD-araB)567, ΔlacZ4787(::rrnB-3), LAM-, rph-1, | aceEF_lpdA (E354K) = native |
| | Δ(rhaD-rhaB)568, hsdR514, ΔldhA::frt, ΔpflB::frt, | promoter and mutated lpd |
| | ΔmgsA::frt, ΔpoxB::frt, Δpta-ack::frt, fabI(ts)-(S241F)-zeoR, | plus-ΔpuuC:T5-aceEF- |
| | fabB(ts)-(A329V), ΔfabF::frt, coaA(R106A), fabD(ts)- | lpd(E354K) |
| | (W257Q), ΔaceBAK:frt, lpd(E354K):loxP, ΔpuuC:T5- | |
| | aceEF-lpd(E354K):loxP | |

[0730] The above strains were evaluated in shake flasks for pyruvate dehydrogenase activity (assay is described in the Common Methods Section). The results in FIG. 19 show an increase of PDH activity from ˜0.4 U/mg to >0.6 U/mg in strains expressing the PT5-PDH operon over wild type strains.

### Example 60

### Construction of a 3HP Production Strain Via Malonyl-CoA with Combinations of Genetic Changes to Reduce Degradation of 3HP, Reduce Byproduct Formation, and Utilize Sucrose Feedstocks

[0731] Strains were designed to reduce or eliminate enzymatic activity through the 3HP degradation pathway or competitive byproduct formation. Modifications were optionally further selected from one or more of the following gene deletions: lactate dehydrogenase (ldhA), pyruvate formate lyase (pflB), methylglyoxyl synthase (mgsA), pyruvate oxidase (poxB), phosphate acetyltransferase (pta), acetate kinase (ackA), aldehyde dehydrogenase A (aldA), acetaldehyde dehydrogenase B (aldB), alcohol dehydrogenase (adhE), γ-glutamyl-γ-aminobutyraldehyde dehydrogenase (puuC), malate synthase (aceB), isocitrate lyase (aceA), isocitrate dehydrogenase (aceK), and KASII (fabF). Additional modifications may include incorporation of additional FAS mutations described in other examples herein, incorporation of the sucrose utilization operon (cscBKA genes) into the aldA locus, incorporation of the PT5-aceEF-lpd operon into the puuC locus described in other examples herein, incorporation of a mutation in pantothenate kinase which is refractory to feedback inhibition (coaA*) (SEQ ID NO 173), and an additional insertion of the PyibD-T7PolI gene into the aldB locus.

[0732] The following genetically modified E. coli strains (listed in Table 45) were constructed from a wild type BW25113 starting host. E. coli BW25113 was obtained from the Yale genetic stock center (New Haven, Conn. USA). These strains were constructed by standard methods such as discussed in the Common Methods Section and also known in the art as referenced above.

TABLE 45
Strain List 8

| Strain | Chromosomal genotype | Plasmid 1 | Plasmid 2 |
|---|---|---|---|
| 547 | F-, Δ(araD-araB)567, ΔlacZ4787(::rrnB- | pTRC-kan- | pACYC- |
| | 3), LAM-, rph-1, Δ(rhaD-rhaB)568, hsdR514, | PyibD-mcr, | Ptpia- |
| | ΔldhA:frt, ΔpflB:frt, ΔmgsA:frt, ΔpoxB:frt, | | accAD- |
| | Δpta-ack:frt, fabI(ts)-(S241F)-zeoR, fabB(ts)- | | PrpiA- |
| | (A329V), ΔfabF:frt, coaA(R106A), fabD(ts)- | | |
| | (W257Q) ΔaceBAK:frt, | | |
| 571 | F-, Δ(araD-araB)567, ΔlacZ4787(::rrnB-3), LAM-, | pTRC-PyibD- | pACYC- |
| | rph-1, Δ(rhaD-rhaB)568, hsdR514, ΔldhA:frt, | mcr | PyibD- |
| | ΔpflB:frt, ΔmgsA:frt, ΔpoxB:frt, Δpta-ack:frt, | | accADBC |
| | fabI(ts)-(S241F)-zeoR, fabB(ts)-(A329V), | | |
| | ΔfabF:frt, coaA(R106A), fabD(ts)-(W257Q), | | |
| | ΔlacI:frt, ΔpuuC::T5-aceEF-lpd(E354K):loxP, | | |
| | ΔaceBAK:frt, lpd(E354K):loxP, ΔaldB:PyibD- | | |
| | T7pol:loxP, ΔadhE:frt, ΔaldA:cscBKA | | |

### Example 61

### Construction of a 3HP Production Strain Via Malonyl-CoA that does not Require the Addition of Antibiotics

[0733] Strains were designed to eliminate the need for antibiotic supplementation to the medium to maintain plasmid stability. Modifications to maintain plasmid stability without antibiotics may include auxotrophic markers (gapA) or toxin/antitoxin systems (ccdAB). The following genetically modified E. coli strains (listed in Table 46) were constructed from a wild type BW25113 starting host. E. coli BW25113 was obtained from the Yale genetic stock center (New Haven, Conn. USA) using standard methods as described in other examples herein.

TABLE 46
Strain List 9

| Strain | Chromosomal genotype | Plasmid 1 | Plasmid 2 |
|---|---|---|---|
| 240 | F-, Δ(araD-araB)567, ΔlacZ4787(::rrnB- | pTRC-Ptrc- | pACYC- |
| | 3), LAM-, rph-1, Δ(rhaD-rhaB)568, hsdR514, | mcr | Ptal-pntAB- |
| | ΔldhA:frt, ΔpflB:frt, ΔmgsA:frt, ΔpoxB:frt, | | Ptpia- |
| | Δpta-ack:frt, fabI(ts)-(S241F)-zeoR | | accAD- |
| | | | PrpiA- |
| | | | accCD |
| 501 | F-, Δ(araD-araB)567, | pTRC-Ptrc- | pACYC- |
| | ΔlacZ4787(::rrnB-3), | mcr-Pkan- | Ptal-pntAB- |
| | LAM-, rph-1, Δ(rhaD- | gapA | Ptpia- |
| | rhaB)568, hsdR514, ΔldhA:frt, ΔpflB:frt, | | accAD- |
| | ΔmgsA:frt, ΔpoxB:frt, Δpta-ack:frt, fabIts | | PrpiA- |
| | (S241F)-zeoR, ΔgapA | | accCD- |
| | | | Pkan- |
| | | | ccdAB |

[0734] The above strains were evaluated for production in the absence of antibiotic addition in 1 L fermentation systems.

TABLE 47
Fermentation metrics for strains with and without antibiotic additions

| | BX3_240 | BX3_240 | BX3_501 |
|---|---|---|---|
| | (with | (without | (without |
| | antibiotics) | antibiotics) | antibiotics) |
| Max Specific Growth (1/hr) | 0.28 | 0.29 | 0.3 |
| Avg Specific Growth (1/hr) | 0.31 | 0.22 | 0.22 |
| Max Volumetric 3-HP | 3.43 | 3.1 | 7.04 |
| Rate (g/L/hr) | | | |
| Max Specific 3-HP | 0.25 | 0.26 | 0.57 |
| Rate (g/gDCW/hr) | | | |
| Avg Volumetric 3-HP | 1.73 | 1.96 | 1.94 |
| Rate (g/L/hr) | | | |
| Avg Specific 3-HP | 0.14 | 0.17 | 0.18 |
| Rate (g/gDCW/hr) | | | |
| Max Titer (g/L) | | 47.3 | 48.2 |
| Yield During Production | 57 | 55.9 | 56.1 |

### Example 62

### Utilization of Sucrose as the Feedstock for Production of 3-HP and Other Products

[0735] Cloning of csc Genes

[0736] Common laboratory and industrial strains of E. coli, such as the strains described herein, are not capable of utilizing sucrose as the sole carbon source, although this property is found in a number of wild strains, including pathogenic E. coli strains. Sucrose, and sucrose-containing feedstocks such as molasses, are abundant and often used as feedstocks for the production by microbial fermentation of organic acids, amino acids, vitamins, and other products. Thus further derivatives of the strains described herein that are capable of utilizing sucrose would expand the range of feedstocks that can be utilized to produce 3-HP and other products.

[0737] Various sucrose uptake and metabolism systems are known in the art (for example, U.S. Pat. No. 6,960,455), incorporated by reference for such teachings. We describe the construction of E. coli strains that harbor the csc genes conferring the ability to utilize sucrose via a non-phosphotransferase system, wherein the csc genes constitute cscA, encoding a sucrose hydrolase, cscB, encoding a sucrose permease, cscK, encoding a fructokinase, and cscR, encoding a repressor. The sequences of these genes are annotated in the NCBI database as accession No. X81461 AF473544. To allow efficient expression utilizing codons that are highly abundant in E. coli genes, an operon containing cscB, cscK, and cscA was designed and synthesized using the services of a commercial synthetic DNA provider (DNA 2.0, Menlo Park, Calif.). The sequences of the genes are set forth as, respectively, cscB-SEQ. ID. No. 176; cscA-SEQ. ID. No. 177; csck-SEQ. ID. No. 178. The synthetic operon consisted of 60 base pairs of the region of the E. coli genome immediately 5′ (upstream) of the adhE gene, a consensus strong promoter to drive expression of the csc genes, the coding regions for cscB, cscK, and cscA with short intergenic regions containing ribosome binding sites but no promoters, and 60 bp immediately 3′ (downstream) of the adhE gene. The segments homologous to sequences flanking the adhE gene may be used to target insertion of the csc operon genes into the E. coli chromosome, with the concomittent deletion of adhE. The nucleotide sequence of the entire synthetic construct is shown as SEQ. ID. No. 179.

[0738] The synthetic csc operon was constructed in plasmid pJ214 (DNA 2.0, Menlo Park, Calif.) that provides an origin of replication derived from plasmid p15A and a gene conferring resistance to ampicillin. This plasmid is denoted pSUCR and shown as SEQ. ID No. 213. Transformation of a suitable host cell, such as E. coli strain 595, with pSUCR rendered it capable of growth on sucrose as the sole carbon source, where the host bearing a control plasmid without the csc gene cluster was not able to utilize this feedstock.

[0739] Chromosomal Integration of csc Genes

[0740] The csc gene cluster was integrated into into the aldA locus of E. coli to generate strains that stably carried the sucrose utilization trait. The promoter-csc region of pSUCR was amplified using primers:

HL021:
(SEQ ID NO: 214)
ATTTCTGCCTTTTATTCCTTTTACACTTGTTTTTATGAAGCCCTTCACAG
AATTGTCCTTTCACGAAAACATTGACATCCCTATCAGTGA
HL022:
(SEQ ID NO: 215)
CACTCATTAAGACTGTAAATAAACCACCTGGGTCTGCAGATATTCATGCA
AGCCATGTTTACCATAAGCTTAACCCAGTTGCCACAGTGC

[0741] Improving Sucrose Utilization Rates

[0742] To increase the utilization of sucrose, the sucrose permease encoded by the cscB gene, known to be the slowest step in sucrose utilization, was mutagenized and subjected to selection for increased sucrose growth rates. Mutagenic PCR was used to generate a number of libraries, each of ˜20,000 individuals, with average mutation rates ranging from 2.7 to 17.8 changes per 1000 bases, using the Diversity PCR Random Mutagenesis Kit (Clontech Laboratories, Mountain View, Calif.). Each library was digested with NcoI and BglII and ligated to pSUCR similarly digested and purified by agarose gel electrophoresis to recover the plasmid fragment from which the parental cscB gene was removed. The mutagenic plasmid library was then transformed into Ecloni 10G Elite electrocompetent cells (Lucigen, Madison Wis.). The mutagenic frequency was determined by sequencing 6 unselected clones from each transformation. Each library was recovered by scraping the colonies off transformation plates and extracting the plasmids with multiple minipreps (Qiagen). The library with the lowest number of changes per 1000 bases was transformed into 595 and the entire transformation mixture passaged repeatedly in SM8 medium containing 30 g/L sucrose for 11 transfers. Twelve individual colonies were isolated from this enriched culture and sequenced. Seven (mutants designated A, B, D, E, G, H, I) of the 12 have the identical cscB sequence, and carry 3 coding mutations (N234D, I312V, I369V). In addition, mutant J has only the N234D change, while mutant C carries the N234D and I313V changes. In this nomenclature, the first letter denotes the amino acid present in the wildtype protein (using the one-letter code where N is asparagine), the numbers represent the position of the residue in the protein chain, and the second letter denotes the amino acid present in the mutant (where D is aspartic acid). The other clones isolated from this enrichment procedure, although carrying changes in the cscB gene, did not grow when re-inoculated into sucrose medium. The sequence of cscB mutant 1A is included as SEQ. ID No. 180. Strains 535 and 536 were constructed from hosts carrying mutant 1A as shown in Table 48 below.

TABLE 48
Strain List 10

| Strain | Chromosomal genotype | Plasmid 1 | Plasmid 2 |
|---|---|---|---|
| 535 | F-, Δ(araD-araB)567, ΔlacZ4787(::rrnB- | pTRC-Ptrc- | pACYC- |
| | 3), LAM-, rph-1, Δ(rhaD-rhaB)568, hsdR514, | mcr | Ptal-pntAB- |
| | ΔldhA:frt, ΔpflB:frt, ΔmgsA:frt, ΔpoxB:frt, | | Ptpia- |
| | Δpta-ack:frt, fabI(ts)-(S241F)-zeoR, | | accAD- |
| | ΔaldB:cscB(1A)AK | | PrpiA- |
| | | | accCD |
| 536 | F-, Δ(araD-araB)567, ΔlacZ4787(::rrnB- | pTRC-Ptrc- | pACYC- |
| | 3), LAM-, rph-1, Δ(rhaD-rhaB)568, hsdR514, | mcr-glk | Ptal-pntAB- |
| | ΔldhA:frt, ΔpflB:frt, ΔmgsA:frt, ΔpoxB:frt, | | Ptpia- |
| | Δpta-ack:frt, fabI(ts)-(S241F)-zeoR, | | accAD- |
| | ΔaldB:cscB(1A)AK | | PrpiA- |
| | | | accCD |

### Example 63

### 3-HP Production Via Malonyl-CoA in Strains with Improved Acetyl-CoA Carboxylase Activity

[0743] Plasmid map 4 shown below (pACYC-T7-rbs accADBC) was constructed by subcloning the gene synthesized accADBC construct with optimized ribosome binding sites for each subunit (GenScript) (SEQ ID NO: 182) into pACYC-DUET (Novagen) at the EcoICRI and EcorV restriction sites to make the final pACYC-T7-rbs accADBC construct (SEQ ID NO: 183).

[0744] Plasmid pACYC-pyibD-rbsaccADBC (SEQ ID NO: 184) shown in Plasmid Map 5 was constructed by replacement of the T7 promoter with the pyibD promoter by conventional cloning methods as described elsewhere herein.

[0745] The strains described in Table 49 were evaluated in shake flasks for increased acetyl-CoA carboxylase (AccAse) activity. Triplicate evaluations were performed. Briefly, overnight starter cultures were made in 50 mL of Luria Broth including the appropriate antibiotics and incubated 16-24 hours are 30° C., while shaking at 225 rpm. These cultures were used to inoculate 3×100 mL cultures of each strain in SM11 minimal medium and antibiotics to an OD 600 nm=0.2. Flasks were grown in the 30° C. in a shaking incubator. When the cultures reach an OD600 nm=0.5, the strains were induced by either phosphate depletion or 0.3 mM IPTG and further incubated at 30 C. After 3 hours, the cultures were shifted to 37 C. Samples were taken for analyses of AccAse enzyme activities after 24 hours as described in the Common Methods Section.

TABLE 49
Strain List 11

| Strain | Chromosomal genotype | Plasmid 1 | Plasmid 2 |
|---|---|---|---|
| 1 | F-, Δ(araD-araB)567, | pTRC-Ptrc- | pACYC |
| | ΔlacZ4787(::rrnB-3), | mcr | (empty vector) |
| | LAM-, rph-1, Δ(rhaD- | | |
| | rhaB)568, hsdR514, | | |
| | ΔldhA:frt, ΔpflB:frt, | | |
| | ΔmgsA:frt, ΔpoxB:frt, | | |
| | Δpta-ack:frt, fabI(ts)- | | |
| | (S241F)-zeoR, fabB(ts)- | | |
| | (A329V), ΔfabF:frt, | | |
| | coaA(R106A), | | |
| | fabD(ts)-(W257Q), | | |
| | ΔaceBAK:frt, DE3 | | |
| 2 | F-, Δ(araD-araB)567, | pTRC-Ptrc- | pACYC-Ptpia- |
| | ΔlacZ4787(::rrnB-3), | mcr | accAD-PrpiA- |
| | LAM-, rph-1, Δ(rhaD- | | accBC |
| | rhaB)568, hsdR514, | | |
| | ΔldhA:frt, ΔpflB:frt, | | |
| | ΔmgsA:frt, ΔpoxB:frt, | | |
| | Δpta-ack:frt, fabI(ts)- | | |
| | (S241F)-zeoR, fabB(ts)- | | |
| | (A329V), ΔfabF:frt, | | |
| | coaA(R106A), | | |
| | fabD(ts)-(W257Q), | | |
| | ΔaceBAK:frt, DE3 | | |
| 3 | F-, Δ(araD-araB)567, | pTRC-Ptrc- | pACYC-PT7- |
| | ΔlacZ4787(::rrnB-3), | mcr | accADBC |
| | LAM-, rph-1, Δ(rhaD- | | |
| | rhaB)568, hsdR514, | | |
| | ΔldhA:frt, ΔpflB:frt, | | |
| | ΔmgsA:frt, ΔpoxB:frt, | | |
| | Δpta-ack:frt, fabI(ts)- | | |
| | (S241F)-zeoR, fabB(ts)- | | |
| | (A329V), ΔfabF:frt, | | |
| | coaA(R106A), | | |
| | fabD(ts)-(W257Q), | | |
| | ΔaceBAK:frt, DE3 | | |
| 4 | F-, Δ(araD-araB)567, | pTRC-PyibD- | pACYC-Ptpia- |
| | ΔlacZ4787(::rrnB-3), | mcr | accAD-PrpiA- |
| | LAM-, rph-1, Δ(rhaD- | | accBC |
| | rhaB)568, hsdR514, | | |
| | ΔldhA:frt, ΔpflB:frt, | | |
| | ΔmgsA:frt, ΔpoxB:frt, | | |
| | Δpta-ack:frt, fabI(ts)- | | |
| | (S241F)-zeoR, fabB(ts)- | | |
| | (A329V), ΔfabF:frt, | | |
| | coaA(R106A), | | |
| | fabD(ts)-(W257Q), | | |
| | ΔlacI:frt, ΔpuuC:T5- | | |
| | aceEF-lpd*, | | |
| | ΔaceBAK:frt, | | |
| | lpd*:loxP, | | |
| | ΔaldB:PyibD- | | |
| | T7pol:BSD, ΔadhE:frt | | |
| 5 | F-, Δ(araD-araB)567, | pTRC-PyibD- | pACYC- |
| | ΔlacZ4787(::rrnB-3), | mcr | PyibD- |
| | LAM-, rph-1, Δ(rhaD- | | accADBC |
| | rhaB)568, hsdR514, | | |
| | ΔldhA:frt, ΔpflB:frt, | | |
| | ΔmgsA:frt, ΔpoxB:frt, | | |
| | Δpta-ack:frt, fabI(ts)- | | |
| | (S241F)-zeoR, fabB(ts)- | | |
| | (A329V), ΔfabF:frt, | | |
| | coaA(R106A), | | |
| | fabD(ts)-(W257Q), | | |
| | ΔlacI:frt, ΔpuuC:T5- | | |
| | aceEF-lpd*, | | |
| | ΔaceBAK:frt, | | |
| | lpd*:loxP, | | |
| | ΔaldB:PyibD- | | |
| | T7pol:BSD, ΔadhE:frt | | |

| | ACCase activity |
|---|---|
| | (umoles/min/mg) |
| 1 | 0.003 |
| 2 | 0.109 |
| 3 | 0.206 |
| 4 | 0.09 |
| 5 | 0.22 |

### Example 64

### 3-HP Production Via Malonyl-coA in Strains with Additional Combinations of FAS Mutations by 1 L Fermentation

[0746] Strains 472 and 479 (Table 50) were constructed by standard molecular biology techniques as described elsewhere herein. Two 1 L fed batch fermentation experiments were carried out using strains 472 and 494. Seed culture was started from 1 ml of glycerol stock for each strain inoculated into 100 mL of TB medium (Terrific Broth) in a corresponding shake flask and incubated at 30° C. until the OD₆₀₀ was between 5 and 6. The shake flask culture was used to aseptically inoculate (5% volume/volume) the corresponding 1 L volume bioreactor so that the post-inoculation volume was 800 ml in each vessel. The fermentors used in this experiment were Das Gip fed-batch pro parallel fermentation systems (DASGIP AG, Julich, Germany, model SR07000DLS). The fermentation system included real-time monitoring and control of dissolved oxygen (% DO), pH, temperature, agitation, and feeding. All fermentors contained defined FM8 medium, made as shown in the Common Methods Section. In each fermentor, the initial temperature was 30° C. Induction was effected by adding IPTG to a final concentration of 2 mM when phosphate is depleted. Glucose feed (consisting of a 500 g/L glucose solution) was initiated to maintain glucose levels between 1-10 g/L. At induction, the temperature was shifted to 37° C. over 1 hour. The broth of each fermentor was maintained at a pH of approximately 7.4 by the controlled addition of a pH titrant 50% NH4(OH). At the time the temperature shift was initiated, the DO was changed to 1%. Samples were taken for optical density measurements as well as HPLC analysis for 3-HP concentration. The biomass concentration at harvest as well as the maximum 3-HP titer and specific 3HP rate during production are summarized in the Table 50 below.

TABLE 50
Strain List 12

| Strain | Chromosomal genotype | Plasmid 1 | Plasmid 2 |
|---|---|---|---|
| 472 | F-, Δ(araD-araB)567, | pTRC- | pACYC- |
| | ΔlacZ4787(::rrnB-3), LAM-, rph-1, | Ptrc- | Ptal-pntAB- |
| | Δ(rhaD-rhaB)568, hsdR514, ΔldhA::frt, | mcr | Ptpia- |
| | ΔpflB::frt, ΔmgsA::frt, ΔpoxB::frt, | | accAD- |
| | Δpta-ack::frt, fabI(ts)-(S241F)-zeoR, | | PrpiA- |
| | fabB(ts), ΔfabF::frt | | accCD |
| 479 | F-, Δ(araD-araB)567, | pTRC- | pACYC- |
| | ΔlacZ4787(::rrnB-3), LAM-, rph-1, | Ptrc- | Ptal-pntAB- |
| | Δ(rhaD-rhaB)568, hsdR514, ΔldhA::frt, | mcr-glk | Ptpia- |
| | ΔpflB::frt, ΔmgsA::frt, ΔpoxB::frt, | | accAD- |
| | Δpta-ack::frt, fabI(ts)-(S241F)-zeoR, | | PrpiA- |
| | ΔarcA, lpd*,fabB(ts), | | accCD |
| | [symbol] | | |

[symbol]

indicates data missing or illegible when filed

TABLE 51

| | | Agitation | Biomass | 3HP | Specific 3 HP |
|---|---|---|---|---|---|
| | Air- | During | Conc. at | Titer | Rate |
| | flow | Production | Harvest | (g/L) | (g/gDCW/hr) |
| Strain | (vvm) | (rpm) | (g DCW/L) | at 40 hrs | over 40 hours |
| BX3 | 1.2 | 600 | 6.6 | 39.2 | 0.15 |
| 472 | | | | | |
| BX3 | 1.2 | 670 | 10.0 | 55.9 | 0.16 |
| 494 | | | | | |

### Example 65

### 3-HP Production Via Malonyl-CoA Using Strain 571

[0747] Strain 571 was constructed by standard molecular biology techniques as described elsewhere herein. The genotype and corresponding plasmids used to construct 571 are listed in Table 52. 3-HP production by strain 571 is demonstrated at 100-mL scale in SM11 (minimal salts) media. Cultures were started from freezer stocks by standard practice (Sambrook and Russell, 2001) into 50 mL of SM11 media plus 35 μg/mL kanamycin and 20 μg/mL chloramphenicol and grown to stationary phase overnight at 30° C. with rotation at 250 rpm. Three mL of this culture was transferred to 100 ml of SM11 media without phosphate plus 30 g/L glucose, 35 μg/ml kanamycin, and 20 μg/mL chloramphenicol in triplicate 250-ml baffled flasks and incubated at 30° C., 250 rpm. The flasks are shifted to 37° C. six hours post inoculation. To monitor growth rate, samples (2 ml) are withdrawn at designated time points for optical density measurements at 600 nm (OD₆₀₀, 1 cm path length). To monitor 3-HP production by these cultures, samples (10 mL) are pelleted by centrifugation at 12,000 rpm for 5 min and the supernatant collected for analysis of 3-HP titer as described under “Analysis of cultures for 3-HP production” in the Common Methods section. Dry cell weight (DCW) is calculated as 0.40 times the measured OD₆₀₀ value, based on baseline DCW to OD₆₀₀ determinations. All data are the average of triplicate cultures. The average specific rate is calculated from the averaged data at the 24-h time point and expressed as g 3-HP produced per gDCW over 16 hours. Production of 3-HP by strain 571 in SM11 medium is shown in Table 52.

TABLE 52
Strain List 13

| Strain | Chromosomal genotype | Plasmid 1 | Plasmid 2 |
|---|---|---|---|
| 571 | F-, Δ(araD-araB)567, | pTRC- | pACYC- |
| | ΔlacZ4787(::rrnB-3), LAM-, rph-1, | PyibD- | PyibD- |
| | Δ(rhaD-rhaB)568, hsdR514, ΔldhA:frt, | mcr | accADBC |
| | ΔpflB:frt, ΔmgsA:frt, ΔpoxB:frt, | | |
| | Δpta-ack:frt, fabI(ts)-(S241F)-zeoR, | | |
| | fabB(ts)-(A329V), ΔfabF:frt, | | |
| | coaA(R106A), fabD(ts)-(W257Q), | | |
| | ΔlacI:frt, | | |
| | ΔpuuC::T5-aceEF-lpd(E354K):loxP, | | |
| | ΔaceBAK:frt, lpd(E354K):loxP, | | |
| | ΔaldB:PyibD-T7pol:loxP, | | |
| | ΔadhE:frt, ΔaldA:cscBKA | | |

TABLE 53
Production of 3-HP by 571 in SM11 medium

| Time | 3HP | Specific Rate |
|---|---|---|
| (hr) | (g/L) | g 3HP/gDCW/hr |
| 6 | 0 | 0 |
| 10 | 0 | 0 |
| 24 | 1.8 | 0.37 |

### Example 66

### Construction of Strains Carrying the Glutamate Dehydrogenase from the Antarctic Psychrotolerant Bacterium Psychrobacter Sp. TAD1 and Deletion of Glutamate Synthase Function

[0748] Deletions and replacements of genes within strains were carried out using the Red/ET Recombination system commercially available from Gene Bridges (Heidelberg, Germany) by following the manufactures instructions. For deletion of the gdhA gene within strains, a kanamycin carrying cassette for the deletion of gdhA was created by polymerase chain reaction using genomic DNA from the Keio collection (Baba et al, 2000) knockout strain for gdhA as template, using the forward primer (SEQ ID NO: 185) and reverse primer (SEQ ID NO: 186) for the reaction. For deletion of the gltB gene within strains, a kanamycin carrying cassette for the deletion of gltB was created by polymerase chain reaction using genomic DNA from the Keio collection (Baba et al, 2000) knockout strain for gltB as template, using the forward primer (SEQ ID NO: 187) and reverse primer (SEQ ID NO: 188) for the reaction. For deletion of the gltD gene within strains, a kanamycin carrying cassette for the deletion of gltD was created by polymerase chain reaction using genomic DNA from the Keio collection (Baba et al, 2000) knockout strain for gltD as template, using the forward primer (SEQ ID NO: 189) and reverse primer (SEQ ID NO: 190) for the reaction. After insertion of any of these deletion cassettes, the antibiotic marker was removed from the genome-integrated strain using FLP-mediated site specific recombination via the 708-FLPe, cm expression plasmid with chloramphenicol resistance marker from Gene Bridges (Heidelberg, Germany) using the manufactures instructions.

[0749] Replacement of the E. coli gdhA gene with the glutamate dehydrogenase gdh gene from the Antarctic psychrotolerant bacterium Psychrobacter sp. TAD1 was performed using the using the Red/ET Recombination system commercially available from Gene Bridges (Heidelberg, Germany) by following the manufactures instructions. For these replacements, the E. coli gdhA gene was replaced with the Psychrobacter sp. TAD1 gdh gene using a replacement cassette produced via a polymerase chain reaction. The template for the polymerase chain reaction was produced using the gene synthesis servicers of GenScript (Piscataway, N.J.). Additional, the gdh gene from the Antarctic psychrotolerant bacterium Psychrobacter sp. TAD1 was codon optimized using methods developed by GenScript. The gene synthesized cassette contained the codon optimized gdh gene, a blasticidin resistance selection marker, and homology regions targeted toward the upstream and downstream regions of the E. coli gdhA genomic region. The sequence of the plasmid provided by GenScript carrying this replacement cassette is provided as (SEQ ID NO: 191). This replacement cassette was amplified with that forward primer (SEQ ID NO: 185) and reverse primer (SEQ ID NO: 186) for the polymerase chain reaction and inserted into strains using the Gene Bridges method.

[0750] Using these various deletion and replacement cassettes, the several strains were created as shown in the Table 54 below using strain 822 as the parent strain.

TABLE 54
Strain List 14

| Strain | Chromosomal genotype |
|---|---|
| 822 | F-, Δ(araD-araB)567, ΔlacZ4787(::rrnB-3), LAM-, |
| | rph-1, Δ(rhaD-rhaB)568, hsdR514, ΔldhA::frt, |
| | ΔpflB::frt, ΔmgsA::frt, ΔpoxB::frt, Δpta-ack::frt, |
| | fabI(ts)-(S241F)-zeoR, fabB(ts), ΔfabF::frt, coaA*, |
| | fabD(ts), ΔlacI::frt, ΔpuuC::T5-aceEF-lpd*::loxP, |
| | ΔaceBAK::frt, lpd*::loxP, ΔaldB::PyibD- |
| 841 | F-, Δ(araD-araB)567, ΔlacZ4787(::rrnB-3), LAM-, |
| | rph-1, Δ(rhaD-rhaB)568, hsdR514, ΔldhA::frt, |
| | ΔpflB::frt, ΔmgsA::frt, ΔpoxB::frt, Δpta-ack::frt, |
| | fabI(ts)-(S241F)-zeoR, fabB(ts), ΔfabF::frt, coaA*, |
| | fabD(ts), ΔlacI::frt, ΔpuuC::T5-aceEF-lpd*::loxP, |
| | ΔaceBAK::frt, lpd*::loxP, ΔaldB::PyibD- |
| 842 | F-, Δ(araD-araB)567, ΔlacZ4787(::rrnB-3), LAM-, |
| | rph-1, Δ(rhaD-rhaB)568, hsdR514, ΔldhA::frt, |
| | ΔpflB::frt, ΔmgsA::frt, ΔpoxB::frt, Δpta-ack::frt, |
| | fabI(ts)-(S241F)-zeoR, fabB(ts), ΔfabF::frt, coaA*, |
| | fabD(ts), ΔlacI::frt, ΔpuuC::T5-aceEF-lpd*::loxP, |
| | ΔaceBAK::frt, lpd*::loxP, ΔaldB::PyibD- |
| | [symbol] |
| 853 | F-, Δ(araD-araB)567, ΔlacZ4787(::rrnB-3), LAM-, |
| | rph-1, Δ(rhaD-rhaB)568, hsdR514, ΔldhA::frt, |
| | ΔpflB::frt, ΔmgsA::frt, ΔpoxB::frt, Δpta-ack::frt, |
| | fabI(ts)-(S241F)-zeoR, fabB(ts), ΔfabF::frt, coaA*, |
| | fabD(ts), ΔlacI::frt, ΔpuuC::T5-aceEF-lpd*::loxP, |
| | ΔaceBAK::frt, lpd*::loxP, ΔaldB::PyibD- |
| | T7pol::loxP, ΔadhE::frt, ΔaldA::CSC, |
| | gdhA(ts)::BSD |
| 844 | F-, Δ(araD-araB)567, ΔlacZ4787(::rrnB-3), LAM-, |
| | rph-1, Δ(rhaD-rhaB)568, hsdR514, ΔldhA::frt, |
| | ΔpflB::frt, ΔmgsA::frt, ΔpoxB::frt, Δpta-ack::frt, |
| | fabI(ts)-(S241F)-zeoR, fabB(ts), ΔfabF::frt, coaA*, |
| | fabD(ts), ΔlacI::frt, ΔpuuC::T5-aceEF-lpd*::loxP, |
| | ΔaceBAK::frt, lpd*::loxP, ΔaldB::PyibD- |

[symbol]

indicates data missing or illegible when filed

### Example 67

### Evaluation of Strains with Controllable Glutamate Production Using the Antarctic Psychrotolerant Bacterium Psychrobacter Sp. TAD1

[0751] In order to evaluate the ability to control glutamate production, cultures of various strains were grown at 30 degrees Celsius for 8 hours and then shifted to 37 degrees Celsius and 40 degrees Celsius and grown for an additional 16 hr. At these increased temperatures, the activity of the Antarctic psychrotolerant bacterium Psychrobacter sp. TAD1 gdh gene should lower significantly as compared to the levels detected at 37 C. Activities were measured as described in the Common Methods Section. The result of this experiment is shown in FIGS. 26-28. Specific activities were calculated from cultures of strains carrying the Psychrobacter sp. TAD1 gdh gene alone (strain 853) or the gltB deletion and Psychrobacter sp. TAD1 gdh gene in combination (strain 842). Upon the shift and growth at 37 degrees Celsius and 40 degrees Celsius, this activity decreased significantly. This result shows that the Psychrobacter sp. TAD1 gdh gene product is inhibited at these temperatures.

### Example 68

### Increased Production Rates, Titers, and Yields Using Strains Carrying Glutamate Dehydrogenase from the Antarctic Psychrotolerant Bacterium Psychrobacter Sp. TAD1 and Deletion of Glutamate Synthase Function

[0752] The strains listed in Table 55 below were created to evaluate glutamate/glutamine production in a 3-HP production strain.

TABLE 55
Strain List 15

| Strain | Chromosomal genotype | Plasmid 1 | Plasmid 2 |
|---|---|---|---|
| 579 | F-, Δ(araD-araB)567, | pTRC- | pACYC- |
| | ΔlacZ4787(::rrnB-3), LAM-, | PyibD- | PyibD- |
| | rph-1, Δ(rhaD-rhaB)568, hsdR514, | mcr(st)- | accADBC |
| | ΔldhA::frt, ΔpflB::frt, ΔmgsA::frt, | PyibD- | |
| | ΔpoxB::frt, Δpta-ack::frt, | mmsB | |
| | fabI(ts)-(S241F)-zeoR, | | |
| | fabB(ts), ΔfabF::frt, coaA*, fabD(ts), | | |
| | ΔlacI::frt, ΔpuuC::T5- | | |
| | aceEF-lpd*::loxP, ΔaceBAK::frt, | | |
| | lpd*::loxP, ΔaldB::PyibD-T7pol::loxP, | | |
| | ΔadhE::frt, ΔaldA::CSC | | |
| 593 | F-, Δ(araD-araB)567, | pTRC- | pACYC- |
| | ΔlacZ4787(::rrnB-3), LAM-, | PyibD- | PyibD- |
| | rph-1, Δ(rhaD-rhaB)568, hsdR514, | mcr(st)- | accADBC |
| | ΔldhA::frt, ΔpflB::frt, ΔmgsA::frt, | PyibD- | |
| | ΔpoxB::frt, Δpta-ack::frt, | mmsB | |
| | fabI(ts)-(S241F)-zeoR, | | |
| | fabB(ts), ΔfabF::frt, coaA*, fabD(ts), | | |
| | ΔlacI::frt, ΔpuuC::T5- | | |
| | aceEF-lpd*::loxP, ΔaceBAK::frt, | | |
| | lpd*::loxP, ΔaldB::PyibD-T7pol::loxP, | | |
| | ΔadhE::frt, ΔaldA::CSC, | | |
| | ΔgltB::frt, gdhA(ts)::BSD | | |

[0753] These strains were grown in shake flasks at 30 degree Celsius for 6 hours in SM11 media without phosphate to induce protein production for the production pathway. At 6 hours, the cultures were shifted to 37 degrees Celsius to shut down fatty acid production and lower the glutamate dehydrogenase activity. The results for these shake flasks are shown FIG. 29. This experiment shows that strain 593 showed an average specific productivity that was greater strain 579.

### Example 69

### Alternative Method for Limiting or Controlling Glutamate Production

[0754] Other routes for limiting glutamate production include 1) deleting the glutamate dehydrogenase gene or 2) deleting the glutamate dehydrogenase gene and regulating expression of glutamate synthase genes or gene products. In this embodiment, the regulation of gltB or gltD could be controlled altering expression as is common in the art or alternatively by using a temperature sensitive version of the glutamate synthase as described above. Such temperature sensitive versions of the gltB and gltD could be isolated in a manner similar to those used by Dendinger et al. (1980) to isolate temperature-sensitive versions of the Salmonella gdhA gene. Alternatively, other methods using sequence and structural-based information could be used to create variants of gltB, gltD, or gdhA genes similar to those described in Chakshusmathi et al (2004).

### Example 70

### Construction of the Sulfolobus Tokodaii Mcr Gene for Expression

[0755] The MCR gene from Sulfolobus tokodaii was synthesized using the services of GenScript (Piscataway, N.J.) using GenScripts' codon optimization methods for expression in E. coli. This gene was synthesized with a Ptrc promoter and was designated pUC57-Ptrc-StMCR (SEQ ID NO: 192).

### Example 71

### Biochemical Assays to Measure Sulfolobus Tokodaii MCR Activity and Combining Malonyl-CoA Reductase and 3-HP Dehydrogenase Activities

[0756] In order to evaluate the use Sulfolobus tokodaii MCR, lysates for assaying the specific activities were prepared from over expressed cultures. The results for the specific activity of Sulfolobus tokodaii MCR using NADH and NADPH cofactors, independently, are shown in FIG. 30. In this experiment, culture begun from 2 different colonies for E. coli cells carrying either the pUC57 control plasmid or the pUC57-Ptrc-StMCR plasmid able to overexpress Sulfolobus tokodaii MCR. This experiment show no detectable malonyl CoA reductase activity in the two control colonies tested, and shows robust malonyl CoA specific activity in the culture overexpressing Sulfolobus tokodaii MCR. The activity with NADPH in these lysates was at least 1.9 units per mg lysate in these experiments, and agrees well for the reported specific activity of 44 units per mg for the purified proteins as evaluated by Alber et al. (2006). In addition to NADPH cofactor, NADH was also assessed as a potential cofactor even though no such activity was previous reported. The activity of Sulfolobus tokodaii MCR was only 4.2 less active than the specific activity with NADPH. Accordingly, this activity and this only mild preference for NADPH potentially make this enzyme more suitable than other malonyl CoA reductases depending on the fermentation process used.

[0757] The results of these experiments are shown in FIG. 30. These results demonstrate that Sulfolobus tokodaii MCR can utilize NADH as a cofactor as well as the previously reported NADPH cofactor. None of the samples evaluating the dehydrogenases or Sulfolobus tokodaii MCR, independently, show significant 3HP formation. Conversely, reactions contain the combination Sulfolobus tokodaii MCR and any of the dehydrogenase were able to make significant amounts of 3HP. The reaction containing Sulfolobus tokodaii MCR and the E. coli ydfG overexpressing lysate showed less production of 3HP. Since E. coli ydfG has a strong preference for NADPH, this result shows how different combinations of malonyl coA reductase domains and dehydrogenase domains with various preferences for either NADPH or NADH could be exploited to yield better production characteristics depending on the fermentation conditions which are known to influence the ratios and amounts of NADPH and NADH within cells.

[0758] Production of 3-HP from malonyl-CoA can in addition be achieved with a NADH-dependent malonyl-CoA reductase activity and an activity that converts malonyl semialdehyde to 3-HP using a biological reductant other than NADPH or NADH, such as the activity encoded by the rutE gene of E. coli or by the nemA gene of E. coli which are reductases that utilize a flavin derivative as the reductant and which further require the activity of a function such as the fre gene product encoding FMN reductase to regenerate the reductant. See, for example, Kim et al., 2010, J. Bacteriol. 192(16): 4089-4102.

[0759] Combinations of a gene encoding malonyl-CoA reductase activity and a gene or genes encoding 3-HP dehydrogenase can be achieved by cloning the respective genes behind promoters such that the genes are operably expressed in the microorganism under conditions that induce expression. The genes may be cloned in plasmid vectors, such as plasmids based on the ColE1 replication or the p15A replication, or may be inserted into the chromosome of the microorganism, such as at a locus which encodes a dispensable function, for example the aldA locus of E. coli. Expression of these genes can be driven by regulated promoters, such as the lac promoter or derivatives thereof, or by the T7 bacteriophage promoter, or by the arabinose promoter, or other DNA sequences known or found to drive expression in E. coli. These examples of constructs and promoters are not meant to be limiting.

### Example 72

### Production of 3HP and Other Products from Xylose

[0760] 3HP production using xylose by strain 240, described elsewhere herein, is demonstrated at 100-mL scale in SM11 (minimal salts) media made without glucose. Cultures are started from freezer stocks by standard practice (Sambrook and Russell, 2001) into 50 mL of TB media plus 35 μg/mL kanamycin and 20 μg/mL chloramphenicol and grown to stationary phase overnight at 30° C. with rotation at 250 rpm. 5 mL of this culture is transferred to 100 ml of SM11 media made without glucose but with 30 g/L xylose, 35 μg/ml kanamycin, 20 μg/mL chloramphenicol, and 1 mM IPTG in triplicate 250-ml baffled flasks and incubated at 30° C., 250 rpm. The flasks are shifted to 37° C. four hours post inoculation. To monitor growth rate, samples (2 ml) are withdrawn at designated time points for optical density measurements at 600 nm (OD₆₀₀, 1 cm path length). To monitor 3HP production by these cultures, samples are pelleted by centrifugation at 12,000 rpm for 5 min and the supernatant collected for analysis of 3-HP titer as described under “Analysis of cultures for 3-HP production” in the Common Methods section. Dry cell weight (DCW) is calculated as 0.40 times the measured OD₆₀₀ value, based on baseline DCW to OD₆₀₀ determinations. All data are the average of triplicate cultures. The average specific productivity is calculated from the averaged data at the 24-h time point and expressed as g 3-HP produced per gDCW. Glucose or xylose concentrations can be determined in g/L using appropriate sensors such as those from YSI Incorporated, and the yield is calculated using the averaged data at the 24-hour time point.

### Example 73

### Production of 3HP and Other Products Via Malonyl-CoA in C. necator Hosts with Combinations of FAS Mutations from Syngas

[0761] The following homologues were identified for E. coli FAS enzymes in C. necator.

TABLE 56
FAS homologues in C. necator

| Enzyme Function | Homologue in C. necator | % Identity | e_value |
|---|---|---|---|
| MALONYL-COA-ACP-TRANSACYL- | gi\|113868530\|ref\|YP_727019.1\| | 59.61 | 2.00E−95 |
| MONOMER | | | |
| FABH-MONOMER | gi\|113868531\|ref\|YP_727020.1\| | 51.7 | 6.00E−93 |
| FABB-MONOMER | gi\|113868527\|ref\|YP_727016.1\| | 38.2 | 3.00E−62 |
| FABB-MONOMER | gi\|116695606\|ref\|YP_841182.1\| | 30.96 | 1.00E−14 |
| 3-OXOACYL-ACP-SYNTHII-MONOMER | gi\|113868527\|ref\|YP_727016.1\| | 63.11 | 2.00E−151 |
| 3-OXOACYL-ACP-SYNTHII-MONOMER | gi\|116695606\|ref\|YP_841182.1\| | 38.7 | 5.00E−28 |
| ENOYL-ACP-REDUCT-NADH-MONOMER | gi\|113868381\|ref\|YP_726870.1\| | 62.06 | 6.00E−91 |
| ENOYL-ACP-REDUCT-NADH-MONOMER | gi\|38637922\|ref\|NP_942896.1\| | 57.37 | 5.00E−83 |
| ENOYL-ACP-REDUCT-NADH-MONOMER | gi\|116695568\|ref\|YP_841144.1\| | 44.71 | 2.00E−57 |
| ENOYL-ACP-REDUCT-NADH-MONOMER | gi\|113866900\|ref\|YP_725389.1\| | 28.52 | 5.00E−17 |
| ENOYL-ACP-REDUCT-NADH-MONOMER | gi\|113869529\|ref\|YP_728018.1\| | 27.95 | 4.00E−14 |
| ENOYL-ACP-REDUCT-NADH-MONOMER | gi\|116694061\|ref\|YP_728272.1\| | 29.3 | 5.00E−14 |
| ENOYL-ACP-REDUCT-NADH-MONOMER | gi\|113866064\|ref\|YP_724553.1\| | 25.87 | 1.00E−11 |
| ENOYL-ACP-REDUCT-NADH-MONOMER | gi\|116694602\|ref\|YP_728813.1\| | 24.16 | 4.00E−11 |
| ENOYL-ACP-REDUCT-NADH-MONOMER | gi\|116695241\|ref\|YP_840817.1\| | 26.36 | 6.00E−11 |
| ENOYL-ACP-REDUCT-NADH-MONOMER | gi\|116695184\|ref\|YP_840760.1\| | 24.32 | 2.00E−10 |
| ENOYL-ACP-REDUCT-NADH-MONOMER | gi\|113869434\|ref\|YP_727923.1\| | 27.41 | 6.00E−10 |
| ENOYL-ACP-REDUCT-NADH-MONOMER | gi\|116696275\|ref\|YP_841851.1\| | 24.52 | 9.00E−10 |
| ENOYL-ACP-REDUCT-NADH-MONOMER | gi\|116695085\|ref\|YP_840661.1\| | 30.7 | 1.00E−08 |
| ENOYL-ACP-REDUCT-NADH-MONOMER | gi\|116694581\|ref\|YP_728792.1\| | 22.1 | 2.00E−08 |
| ENOYL-ACP-REDUCT-NADH-MONOMER | gi\|116695770\|ref\|YP_841346.1\| | 26.62 | 5.00E−08 |
| ENOYL-ACP-REDUCT-NADH-MONOMER | gi\|113867286\|ref\|YP_725775.1\| | 26.72 | 9.00E−08 |
| ACYLCOASYN-MONOMER | gi\|113869241\|ref\|YP_727730.1\| | 56.96 | 0 |
| ACYLCOASYN-MONOMER | gi\|113868752\|ref\|YP_727241.1\| | 33.87 | 2.00E−77 |
| ACYLCOASYN-MONOMER | gi\|113867951\|ref\|YP_726440.1\| | 32.18 | 6.00E−76 |
| ACYLCOASYN-MONOMER | gi\|113869452\|ref\|YP_727941.1\| | 33.27 | 1.00E−71 |
| ACYLCOASYN-MONOMER | gi\|113867314\|ref\|YP_725803.1\| | 31.54 | 1.00E−68 |
| ACYLCOASYN-MONOMER | gi\|113868228\|ref\|YP_726717.1\| | 30.87 | 1.00E−62 |
| ACYLCOASYN-MONOMER | gi\|116694647\|ref\|YP_728858.1\| | 30.05 | 4.00E−62 |
| ACYLCOASYN-MONOMER | gi\|113868902\|ref\|YP_727391.1\| | 29.93 | 9.00E−62 |
| ACYLCOASYN-MONOMER | gi\|113866897\|ref\|YP_725386.1\| | 31.14 | 2.00E−60 |
| ACYLCOASYN-MONOMER | gi\|113868933\|ref\|YP_727422.1\| | 31.07 | 2.00E−59 |
| ACYLCOASYN-MONOMER | gi\|116695183\|ref\|YP_840759.1\| | 31.07 | 1.00E−58 |
| ACYLCOASYN-MONOMER | gi\|116694856\|ref\|YP_729067.1\| | 31.91 | 2.00E−58 |
| ACYLCOASYN-MONOMER | gi\|113866865\|ref\|YP_725354.1\| | 30.11 | 4.00E−58 |
| ACYLCOASYN-MONOMER | gi\|116694595\|ref\|YP_728806.1\| | 28.73 | 1.00E−56 |
| ACYLCOASYN-MONOMER | gi\|116694129\|ref\|YP_728340.1\| | 30.91 | 2.00E−53 |
| ACYLCOASYN-MONOMER | gi\|116695208\|ref\|YP_840784.1\| | 31.88 | 2.00E−52 |
| ACYLCOASYN-MONOMER | gi\|113868706\|ref\|YP_727195.1\| | 28.86 | 1.00E−50 |
| ACYLCOASYN-MONOMER | gi\|116695648\|ref\|YP_841224.1\| | 30.71 | 2.00E−50 |
| ACYLCOASYN-MONOMER | gi\|116694665\|ref\|YP_728876.1\| | 29.49 | 4.00E−50 |
| ACYLCOASYN-MONOMER | gi\|113867426\|ref\|YP_725915.1\| | 27.46 | 2.00E−49 |
| ACYLCOASYN-MONOMER | gi\|116695854\|ref\|YP_841430.1\| | 28.35 | 4.00E−48 |
| ACYLCOASYN-MONOMER | gi\|116694628\|ref\|YP_728839.1\| | 28.86 | 8.00E−48 |
| ACYLCOASYN-MONOMER | gi\|113868764\|ref\|YP_727253.1\| | 29.61 | 2.00E−47 |
| ACYLCOASYN-MONOMER | gi\|116695316\|ref\|YP_840892.1\| | 29.1 | 2.00E−46 |
| ACYLCOASYN-MONOMER | gi\|116695341\|ref\|YP_840917.1\| | 28.8 | 5.00E−46 |
| ACYLCOASYN-MONOMER | gi\|113866892\|ref\|YP_725381.1\| | 32.96 | 4.00E−45 |
| ACYLCOASYN-MONOMER | gi\|113868055\|ref\|YP_726544.1\| | 26.24 | 1.00E−44 |
| ACYLCOASYN-MONOMER | gi\|113867721\|ref\|YP_726210.1\| | 28.71 | 3.00E−44 |
| ACYLCOASYN-MONOMER | gi\|116696458\|ref\|YP_842034.1\| | 30.25 | 7.00E−43 |
| ACYLCOASYN-MONOMER | gi\|113867704\|ref\|YP_726193.1\| | 28.46 | 2.00E−42 |
| ACYLCOASYN-MONOMER | gi\|113868126\|ref\|YP_726615.1\| | 26.92 | 1.00E−41 |
| ACYLCOASYN-MONOMER | gi\|116695632\|ref\|YP_841208.1\| | 27.15 | 3.00E−40 |
| ACYLCOASYN-MONOMER | gi\|113868425\|ref\|YP_726914.1\| | 26.74 | 2.00E−39 |
| ACYLCOASYN-MONOMER | gi\|38638060\|ref\|NP_943034.1\| | 28.21 | 4.00E−39 |
| ACYLCOASYN-MONOMER | gi\|116694704\|ref\|YP_728915.1\| | 27.64 | 5.00E−39 |
| ACYLCOASYN-MONOMER | gi\|113869299\|ref\|YP_727788.1\| | 26.4 | 5.00E−38 |
| ACYLCOASYN-MONOMER | gi\|116695047\|ref\|YP_840623.1\| | 27.19 | 3.00E−35 |
| ACYLCOASYN-MONOMER | gi\|116695279\|ref\|YP_840855.1\| | 25.14 | 3.00E−35 |
| ACYLCOASYN-MONOMER | gi\|113867249\|ref\|YP_725738.1\| | 31.28 | 5.00E−35 |
| ACYLCOASYN-MONOMER | gi\|113867217\|ref\|YP_725706.1\| | 25.5 | 9.00E−35 |
| ACYLCOASYN-MONOMER | gi\|113867530\|ref\|YP_726019.1\| | 25.05 | 6.00E−33 |
| ACYLCOASYN-MONOMER | gi\|116695093\|ref\|YP_840669.1\| | 27.74 | 2.00E−32 |
| ACYLCOASYN-MONOMER | gi\|38638059\|ref\|NP_943033.1\| | 25.54 | 2.00E−31 |
| ACYLCOASYN-MONOMER | gi\|113867503\|ref\|YP_725992.1\| | 44.52 | 4.00E−28 |
| ACYLCOASYN-MONOMER | gi\|116696036\|ref\|YP_841612.1\| | 28.86 | 8.00E−28 |
| ACYLCOASYN-MONOMER | gi\|116694780\|ref\|YP_728991.1\| | 25.66 | 8.00E−27 |
| ACYLCOASYN-MONOMER | gi\|113868491\|ref\|YP_726980.1\| | 25.66 | 9.00E−27 |
| ACYLCOASYN-MONOMER | gi\|116695672\|ref\|YP_841248.1\| | 24.91 | 9.00E−25 |
| ACYLCOASYN-MONOMER | gi\|113867627\|ref\|YP_726116.1\| | 25.04 | 2.00E−22 |
| ACYLCOASYN-MONOMER | gi\|116695626\|ref\|YP_841202.1\| | 25.5 | 4.00E−21 |
| ACYLCOASYN-MONOMER | gi\|116695626\|ref\|YP_841202.1\| | 23.85 | 4.00E−15 |
| ACYLCOASYN-MONOMER | gi\|113868430\|ref\|YP_726919.1\| | 24.06 | 6.00E−20 |
| ACYLCOASYN-MONOMER | gi\|113866315\|ref\|YP_724804.1\| | 23.54 | 3.00E−15 |
| ACYLCOASYN-MONOMER | gi\|116695622\|ref\|YP_841198.1\| | 23.26 | 1.00E−13 |
| ACYLCOASYN-MONOMER | gi\|116695624\|ref\|YP_841200.1\| | 27.13 | 1.00E−12 |
| ACYLCOASYN-MONOMER | gi\|116695625\|ref\|YP_841201.1\| | 23.55 | 4.00E−10 |
| 3-OXOACYL-ACP-REDUCT-MONOMER | gi\|113868529\|ref\|YP_727018.1\| | 63.52 | 9.00E−86 |
| 3-OXOACYL-ACP-REDUCT-MONOMER | gi\|113867453\|ref\|YP_725942.1\| | 41.7 | 5.00E−51 |
| 3-OXOACYL-ACP-REDUCT-MONOMER | gi\|113867981\|ref\|YP_726470.1\| | 40.41 | 2.00E−50 |
| 3-OXOACYL-ACP-REDUCT-MONOMER | gi\|113868147\|ref\|YP_726636.1\| | 43.4 | 1.00E−48 |
| 3-OXOACYL-ACP-REDUCT-MONOMER | gi\|116695840\|ref\|YP_841416.1\| | 40.66 | 3.00E−47 |
| 3-OXOACYL-ACP-REDUCT-MONOMER | gi\|113869118\|ref\|YP_727607.1\| | 38.62 | 2.00E−43 |
| 3-OXOACYL-ACP-REDUCT-MONOMER | gi\|116696446\|ref\|YP_842022.1\| | 43.1 | 4.00E−42 |
| 3-OXOACYL-ACP-REDUCT-MONOMER | gi\|116694315\|ref\|YP_728526.1\| | 38.89 | 2.00E−41 |
| 3-OXOACYL-ACP-REDUCT-MONOMER | gi\|116694338\|ref\|YP_728549.1\| | 36.8 | 3.00E−39 |
| 3-OXOACYL-ACP-REDUCT-MONOMER | gi\|113867286\|ref\|YP_725775.1\| | 38.62 | 5.00E−38 |
| 3-OXOACYL-ACP-REDUCT-MONOMER | gi\|116695278\|ref\|YP_840854.1\| | 37.55 | 9.00E−36 |
| 3-OXOACYL-ACP-REDUCT-MONOMER | gi\|113867797\|ref\|YP_726286.1\| | 36.86 | 2.00E−35 |
| 3-OXOACYL-ACP-REDUCT-MONOMER | gi\|116695770\|ref\|YP_841346.1\| | 35.27 | 7.00E−35 |
| 3-OXOACYL-ACP-REDUCT-MONOMER | gi\|116694022\|ref\|YP_728233.1\| | 33.88 | 7.00E−35 |
| 3-OXOACYL-ACP-REDUCT-MONOMER | gi\|116695384\|ref\|YP_840960.1\| | 36.96 | 1.00E−34 |
| 3-OXOACYL-ACP-REDUCT-MONOMER | gi\|113867306\|ref\|YP_725795.1\| | 35.06 | 1.00E−34 |
| 3-OXOACYL-ACP-REDUCT-MONOMER | gi\|116695635\|ref\|YP_841211.1\| | 40.68 | 1.00E−32 |
| 3-OXOACYL-ACP-REDUCT-MONOMER | gi\|113867542\|ref\|YP_726031.1\| | 34.12 | 1.00E−32 |
| 3-OXOACYL-ACP-REDUCT-MONOMER | gi\|113867353\|ref\|YP_725842.1\| | 31.64 | 1.00E−31 |
| 3-OXOACYL-ACP-REDUCT-MONOMER | gi\|116695184\|ref\|YP_840760.1\| | 33.33 | 5.00E−31 |
| 3-OXOACYL-ACP-REDUCT-MONOMER | gi\|116694602\|ref\|YP_728813.1\| | 32.66 | 9.00E−31 |
| 3-OXOACYL-ACP-REDUCT-MONOMER | gi\|113868128\|ref\|YP_726617.1\| | 33.46 | 2.00E−30 |
| 3-OXOACYL-ACP-REDUCT-MONOMER | gi\|116695020\|ref\|YP_840596.1\| | 34.17 | 7.00E−30 |
| 3-OXOACYL-ACP-REDUCT-MONOMER | gi\|116695668\|ref\|YP_841244.1\| | 30.95 | 3.00E−29 |
| 3-OXOACYL-ACP-REDUCT-MONOMER | gi\|116694617\|ref\|YP_728828.1\| | 33.78 | 4.00E−29 |
| 3-OXOACYL-ACP-REDUCT-MONOMER | gi\|116694552\|ref\|YP_728763.1\| | 32.8 | 4.00E−29 |
| 3-OXOACYL-ACP-REDUCT-MONOMER | gi\|116696275\|ref\|YP_841851.1\| | 35.25 | 5.00E−29 |
| 3-OXOACYL-ACP-REDUCT-MONOMER | gi\|113868428\|ref\|YP_726917.1\| | 34.18 | 9.00E−29 |
| 3-OXOACYL-ACP-REDUCT-MONOMER | gi\|113867344\|ref\|YP_725833.1\| | 30.86 | 1.00E−28 |
| 3-OXOACYL-ACP-REDUCT-MONOMER | gi\|116695241\|ref\|YP_840817.1\| | 33.74 | 3.00E−28 |
| 3-OXOACYL-ACP-REDUCT-MONOMER | gi\|116695722\|ref\|YP_841298.1\| | 33.88 | 5.00E−28 |
| 3-OXOACYL-ACP-REDUCT-MONOMER | gi\|116694061\|ref\|YP_728272.1\| | 37.6 | 2.00E−27 |
| 3-OXOACYL-ACP-REDUCT-MONOMER | gi\|113866956\|ref\|YP_725445.1\| | 33.59 | 7.00E−27 |
| 3-OXOACYL-ACP-REDUCT-MONOMER | gi\|113868440\|ref\|YP_726929.1\| | 36.14 | 1.00E−26 |
| 3-OXOACYL-ACP-REDUCT-MONOMER | gi\|116694682\|ref\|YP_728893.1\| | 32.94 | 1.00E−26 |
| 3-OXOACYL-ACP-REDUCT-MONOMER | gi\|113866770\|ref\|YP_725259.1\| | 33.2 | 4.00E−26 |
| 3-OXOACYL-ACP-REDUCT-MONOMER | gi\|116694156\|ref\|YP_728367.1\| | 33.05 | 1.00E−25 |
| 3-OXOACYL-ACP-REDUCT-MONOMER | gi\|113867502\|ref\|YP_725991.1\| | 31.02 | 5.00E−24 |
| 3-OXOACYL-ACP-REDUCT-MONOMER | gi\|113866875\|ref\|YP_725364.1\| | 34.93 | 7.00E−24 |
| 3-OXOACYL-ACP-REDUCT-MONOMER | gi\|116694685\|ref\|YP_728896.1\| | 30.59 | 2.00E−23 |
| 3-OXOACYL-ACP-REDUCT-MONOMER | gi\|116695830\|ref\|YP_841406.1\| | 31.45 | 5.00E−23 |
| 3-OXOACYL-ACP-REDUCT-MONOMER | gi\|116694347\|ref\|YP_728558.1\| | 30.52 | 7.00E−23 |
| 3-OXOACYL-ACP-REDUCT-MONOMER | gi\|116695926\|ref\|YP_841502.1\| | 31.2 | 8.00E−23 |
| 3-OXOACYL-ACP-REDUCT-MONOMER | gi\|116694593\|ref\|YP_728804.1\| | 31.15 | 2.00E−22 |
| 3-OXOACYL-ACP-REDUCT-MONOMER | gi\|116694550\|ref\|YP_728761.1\| | 30.36 | 2.00E−22 |
| 3-OXOACYL-ACP-REDUCT-MONOMER | gi\|113869434\|ref\|YP_727923.1\| | 30.04 | 9.00E−22 |
| 3-OXOACYL-ACP-REDUCT-MONOMER | gi\|116694600\|ref\|YP_728811.1\| | 28.99 | 2.00E−21 |
| 3-OXOACYL-ACP-REDUCT-MONOMER | gi\|113866064\|ref\|YP_724553.1\| | 27.2 | 4.00E−21 |
| 3-OXOACYL-ACP-REDUCT-MONOMER | gi\|116694638\|ref\|YP_728849.1\| | 33.13 | 2.00E−20 |
| 3-OXOACYL-ACP-REDUCT-MONOMER | gi\|116694259\|ref\|YP_728470.1\| | 35.18 | 3.00E−20 |
| 3-OXOACYL-ACP-REDUCT-MONOMER | gi\|116694664\|ref\|YP_728875.1\| | 30.43 | 9.00E−20 |
| 3-OXOACYL-ACP-REDUCT-MONOMER | gi\|113867940\|ref\|YP_726429.1\| | 32.56 | 1.00E−19 |
| 3-OXOACYL-ACP-REDUCT-MONOMER | gi\|116695703\|ref\|YP_841279.1\| | 30.92 | 1.00E−19 |
| 3-OXOACYL-ACP-REDUCT-MONOMER | gi\|116695910\|ref\|YP_841486.1\| | 31.44 | 2.00E−19 |
| 3-OXOACYL-ACP-REDUCT-MONOMER | gi\|116695451\|ref\|YP_841027.1\| | 31.77 | 4.00E−19 |
| 3-OXOACYL-ACP-REDUCT-MONOMER | gi\|116695846\|ref\|YP_841422.1\| | 34.36 | 4.00E−19 |
| 3-OXOACYL-ACP-REDUCT-MONOMER | gi\|116694614\|ref\|YP_728825.1\| | 31.15 | 6.00E−19 |
| 3-OXOACYL-ACP-REDUCT-MONOMER | gi\|116696432\|ref\|YP_842008.1\| | 27.73 | 1.00E−18 |
| 3-OXOACYL-ACP-REDUCT-MONOMER | gi\|113867868\|ref\|YP_726357.1\| | 29.8 | 1.00E−18 |
| 3-OXOACYL-ACP-REDUCT-MONOMER | gi\|113866900\|ref\|YP_725389.1\| | 30 | 7.00E−18 |
| 3-OXOACYL-ACP-REDUCT-MONOMER | gi\|113869529\|ref\|YP_728018.1\| | 31.02 | 1.00E−17 |
| 3-OXOACYL-ACP-REDUCT-MONOMER | gi\|116695085\|ref\|YP_840661.1\| | 29.03 | 1.00E−16 |
| 3-OXOACYL-ACP-REDUCT-MONOMER | gi\|116695734\|ref\|YP_841310.1\| | 31.95 | 1.00E−16 |
| 3-OXOACYL-ACP-REDUCT-MONOMER | gi\|113866629\|ref\|YP_725118.1\| | 27.95 | 6.00E−16 |
| 3-OXOACYL-ACP-REDUCT-MONOMER | gi\|116695726\|ref\|YP_841302.1\| | 31.89 | 1.00E−15 |
| 3-OXOACYL-ACP-REDUCT-MONOMER | gi\|116694599\|ref\|YP_728810.1\| | 31.84 | 1.00E−15 |
| 3-OXOACYL-ACP-REDUCT-MONOMER | gi\|116694585\|ref\|YP_728796.1\| | 30.42 | 2.00E−15 |
| 3-OXOACYL-ACP-REDUCT-MONOMER | gi\|116694581\|ref\|YP_728792.1\| | 28.14 | 2.00E−15 |
| 3-OXOACYL-ACP-REDUCT-MONOMER | gi\|116695741\|ref\|YP_841317.1\| | 30.9 | 4.00E−14 |
| 3-OXOACYL-ACP-REDUCT-MONOMER | gi\|116694341\|ref\|YP_728552.1\| | 28.35 | 7.00E−14 |
| 3-OXOACYL-ACP-REDUCT-MONOMER | gi\|113866193\|ref\|YP_724682.1\| | 28.95 | 3.00E−13 |
| 3-OXOACYL-ACP-REDUCT-MONOMER | gi\|116695568\|ref\|YP_841144.1\| | 29.03 | 3.00E−13 |
| 3-OXOACYL-ACP-REDUCT-MONOMER | gi\|116695287\|ref\|YP_840863.1\| | 30.22 | 5.00E−13 |
| 3-OXOACYL-ACP-REDUCT-MONOMER | gi\|113869676\|ref\|YP_728165.1\| | 28.14 | 1.00E−12 |
| 3-OXOACYL-ACP-REDUCT-MONOMER | gi\|113867547\|ref\|YP_726036.1\| | 22.48 | 1.00E−12 |
| 3-OXOACYL-ACP-REDUCT-MONOMER | gi\|113866289\|ref\|YP_724778.1\| | 28 | 4.00E−12 |
| 3-OXOACYL-ACP-REDUCT-MONOMER | gi\|113867750\|ref\|YP_726239.1\| | 29.59 | 3.00E−11 |
| 3-OXOACYL-ACP-REDUCT-MONOMER | gi\|116696287\|ref\|YP_841863.1\| | 27.6 | 4.00E−11 |
| 3-OXOACYL-ACP-REDUCT-MONOMER | gi\|116694597\|ref\|YP_728808.1\| | 31.69 | 2.00E−10 |
| 3-OXOACYL-ACP-REDUCT-MONOMER | gi\|116694624\|ref\|YP_728835.1\| | 33.01 | 7.00E−08 |
| FABZ-MONOMER | gi\|113868023\|ref\|YP_726512.1\| | 57.25 | 3.00E−45 |

[0762] The following homologues have been annotated as homologues by <<www.metacyc.org>>.

TABLE 57

| E. coli gene | C. necator gene |
|---|---|
| fabD | fabD |
| fabH | fabH |
| fabB | fabB |
| fabF | fabF |
| fabG | h16_B1904, h16_B0361, |
| | h16_B0385 |
| fabZ | |
| fabI | PHG261, fabI1, fabI2 |

[0763] Strains can be made with equivalent combinations of fatty acid synthesis mutations to those described elsewhere herein for improved production of malonyl-CoA derived products in E. coli. Deletions and temperature sensitive mutations in equivalent homologues can be made by standard recombineering techniques previously described. Identification of relevant homologues for mutation/deletion can be completed by complementation of E. coli strains with FAS mutations. For example, in the case of fabI, the three fabI homologues annotated for C. necator were cloned into standard E. coli expression vectors and transformed using standard techniques into E. coli strains with and without temperature-sensitive fabI mutations. Strains constructed for this study are listed in Table 58 below:

| | | | |
|---|---|---|---|
| Strain | Chromosomal genotype | Plasmid 1 | Plasmid 2 |

| | | |
|---|---|---|
| 595 | F-, Δ (araD-araB)567, | N/A |
| | ΔlacZ4787(::rrnB-3), | |
| | LAM-, rph-1, Δ(rhaD- | |
| | rhaB)568, hsdR514, | |
| | ΔldhA:frt, ΔpflB:frt, | |
| | mgsA:frt, ΔpoxB:frt, | |
| | Δpta-ack:frt, fabIts | |
| | (S241F)-zeoR | |
| 1 | F-, Δ (araD-araB)567, | pTRC empty |
| | ΔlacZ4787(::rrnB-3), | vector |
| | LAM-, rph-1, Δ(rhaD- | |
| | rhaB)568, hsdR514, | |
| | ΔldhA:frt, ΔpflB:frt, | |
| | mgsA:frt, ΔpoxB:frt, | |
| | Δpta-ack:frt, fabIts | |
| | (S241F)-zeoR | |
| 591 | F-, Δ(araD-araB)567, | N/A |
| | Δ1acZ4787(::rrnB-3), | |
| | LAM-, rph-1, Δ(rhaD- | |
| | rhaB)568, hsdR514, | |
| | Δ1dhA:frt, ΔpflB:frt, | |
| | mgsA:frt, ΔpoxB:frt, | |
| | Δpta-ack:frt | |
| 2 | F-, Δ(araD-araB)567, | pTRC_fabI1 |
| | Δ1acZ4787(::rrnB-3), | |
| | LAM-, rph-1, Δ(rhaD- | |
| | rhaB)568, hsdR514, | |
| | Δ1dhA:frt, ΔpflB:frt, | |
| | mgsA:frt, ΔpoxB:frt, | |
| | Δpta-ack:frt | |
| 3 | F-, Δ(araD-araB)567, | pTRC_fabI2 |
| | Δ1acZ4787(::rrnB-3), | |
| | LAM-, rph-1, Δ(rhaD- | |
| | rhaB)568, hsdR514, | |
| | Δ1dhA:frt, ΔpflB:frt, | |
| | mgsA:frt, ΔpoxB:frt, | |
| | Δpta-ack:frt | |
| 4 | F-, Δ(araD-araB)567, | pTRC_PHG261 |
| | Δ1acZ4787(::rrnB-3), | |
| | LAM-, rph-1, Δ(rhaD- | |
| | rhaB)568, hsdR514, | |
| | Δ1dhA:frt, ΔpflB:frt, | |
| | mgsA:frt, ΔpoxB:frt, | |
| | Δpta-ack:frt | |

[0764] These strains were grown in shake flasks at 37 degrees Celsius in SM11 media for 24 hours. Samples were taken for OD600 and flaviolin measurements (see Common Methods section for detailed protocol). Results from flaviolin quantification are shown FIG. 32. This complementation study suggests that fabI1, which shows the lowest production of flaviolin, is primarily responsible for fabI activity as seen by the diminished production and is followed by partial complementation observed for fabI2.

[0765] Strains with all combinations of fabI deletions/mutations are made by standard techniques. The genes encoding malonyl coA reductase (mcr) with combinations of other genes to enhance 3HP production described elsewhere herein are cloned into appropriate expression vectors for high level expression in C. necator using standard molecular biology techniques and transformed into C. necator hosts with FAS inhibition. Vectors were constructed on a broad host range plasmid (pBMT3) with the Ptrc induction system that drives expression of mcr and accAse. A subset of C. necator strains are constructed are listed in Table 59 below:

TABLE 59

| | Modifications made to | | |
|---|---|---|---|
| | C. necator H16 | | |
| | Chromosomal | | |
| Strain | genotype | Plasmid 1 | Plasmid 2 |
| C. necator | | pBMT3-Ptrc-mcr- | N/A |
| H16 | | accABCD | |
| C. necator | fabI1(ts)-(S241F) | pBMT3-Ptrc-mcr- | N/A |
| H16-1 | | accABCD | |
| C. necator | fabI2(ts)-(S241F) | pBMT3-Ptrc-mcr- | N/A |
| H16-2 | | accABCD | |
| C. necator | fabI1(ts)-(S241F), | pBMT3-Ptrc-mcr- | N/A |
| H16-3 | fabI2(ts)-(S241F) | accABCD | |
| C. necator | fabI1(ts)-(S241F), | pBMT3-Ptrc-mcr- | N/A |
| H16-4 | fabI2(ts)-(S241F), | accABCD | |
| | ΔphaCAB | | |

[0766] 3HP production using syngas feedstocks is demonstrated at 0.6 L scale in SM11 (minimal salts) media. Cultures of C. necator strains listed in Table 59 are started from freezer stocks by standard practice (Sambrook and Russell, 2001) into 49 mL of FGN30 medium supplemented with appropriate antibiotics and incubated at 30° C. for 24 hours with rotation at 250 rpm. 5 mL of this culture is transferred to 45 ml of FGN30 FIN with appropriate antibiotics and is incubated at 30° C. for 24 hours with rotation at 250 rpm. Cultures are used to inoculate gas-fed columns maintained at 30 C as described under “Syngas Fermentation Method” in the Common Methods Section.

### Example 74

### Butyrate Production Via Malonyl-coA in Strains with Combinations of FAS Mutations

[0767] The following genetically modified E. coli strains (listed in Table 60) were constructed form a wild type BW25113 starting host. E. coli BW25113 was obtained from the Yale genetic stock center (New Haven, Conn., USA). These strains were constructed by standard methods such as discussed in the Common Methods Section and also known in the art as referenced above. Briefly, chromosomal modifications were constructed via homologous recombination.

[0768] The following plasmids can be constructed by gene synthesis (Genscript, Piscataway, N.J.). The target gene sequences were ordered (Genscript, Piscataway, N.J.) including with modifications to the native ribosome binding site and subsequently changed to be compatible with existing expression vectors and to accommodate expression of key downstream gene(s) within the vector(s).

TABLE 60
Strain List 16

| Strain | Chromosomal genotype | Plasmid 1 | Plasmid 2 |
|---|---|---|---|
| 1 | F-, Δ(araD-araB)567, | pACYC (empty) | pET28B |
| | ΔlacZ4787(::rrnB-3), LAM-, | | (empty) |
| | rph-1, Δ(rhaD-rhaB)568, | | |
| | hsdR514, ΔldhA::frt, | | |
| | ΔpflB::frt, ΔmgsA::frt, | | |
| | ΔpoxB::frt, Δpta-ack::frt, | | |
| | fabI(ts)-(S241F)-zeoR, | | |
| | ΔfadD::frt, lambda-DES; | | |
| | ΔatoDAEB::frt | | |
| 2 | F-, Δ(araD-araB)567, | pACYC (empty) | pET28B (ptb- |
| | ΔlacZ4787(::rrnB-3), LAM-, | | buk) |
| | rph-1, Δ(rhaD-rhaB)568, | | |
| | hsdR514, ΔldhA::frt, | | |
| | ΔpflB::frt, ΔmgsA::frt, | | |
| | ΔpoxB::frt, Δpta-ack::frt, | | |
| | fabI(ts)-(S241F)-zeoR, | | |
| | ΔfadD::frt, lambda-DES; | | |
| | ΔatoDAEB::frt | | |
| 3 | F-, Δ(araD-araB)567, | pACYC(phaA- | pET28B (ptb- |
| | ΔlacZ4787(::rrnB-3), | hbd-crt-ter) | buk) |
| | LAM-, rph-1, Δ(rhaD- | | |
| | rhaB)568, hsdR514, | | |
| | ΔldhA::frt, ΔpflB::frt, | | |
| | ΔmgsA::frt, | | |
| | ΔpoxB::frt, Δpta- | | |
| | ack::frt, fabI(ts)- | | |
| | (S241F)-zeoR, | | |
| | ΔfadD::frt, lambda- | | |
| | DE3; ΔatoDAEB::frt | | |
| 4 | F-, Δ(araD-araB)567, | pACYC(npht7- | pET28B (ptb- |
| | ΔlacZ4787(::rrnB-3), | hbd-crt-ter) | buk) |
| | LAM-, rph-1, Δ(rhaD- | | |
| | rhaB)568, hsdR514, | | |
| | ΔldhA::frt, ΔpflB::frt, | | |
| | ΔmgsA::frt, | | |
| | ΔpoxB::frt, Δpta- | | |
| | ack::frt, fabI(ts)- | | |
| | (S241F)-zeoR, | | |
| | ΔfadD::frt, lambda- | | |
| | DE3; ΔatoDAEB::frt | | |
| 5 | F-, Δ(araD-araB)567, | pACYC(npht7- | pET28B (ptb- |
| | ΔlacZ4787(::rrnB-3), | hbd-crt-ter) | buk) |
| | LAM-, rph-1, Δ(rhaD- | | |
| | rhaB)568, hsdR514, | | |
| | ΔldhA::frt, ΔpflB::frt, | | |
| | ΔmgsA::frt, | | |
| | ΔpoxB::frt, Δpta- | | |
| | ack::frt, fabI(ts)- | | |
| | (S241F)-zeoR, | | |
| | fabB(ts), ΔfabF::frt, | | |
| | coaA*, fabD(ts), | | |
| | ΔlacI::frt, ΔpuuC::T5- | | |
| | aceEF-lpd*::loxP, | | |
| | ΔaceBAK::frt, | | |
| | lpd*::loxP, | | |
| | ΔaldB::PyibD- | | |
| | T7pol::loxP, | | |
| | ΔadhE::frt, | | |
| | ΔaldA::CSC, lambda- | | |
| | DE3, ΔatoDAEB | | |

[0769] The above strains were evaluated in shake flasks for the production of butyrate. Triplicate evaluations were performed. Briefly, overnight starter cultures were made in 50 mL of Luria Broth including the appropriate antibiotics and incubated 16-24 hours are 30° C., while shaking at 225 rpm. These cultures were used to inoculate 3×50 mL cultures of each strain in SM11 minimal medium with 5% culture as starting inoculum, and antibiotics. The cultures are grown at 30° C. for approximately 4 h to an OD of 0.4-0.6 and then induced with IPTG (0.5 mM), after 1 h cells were shifted to 37° C. and monitored for 28 hours. Samples were taken at 18 h and 28 h and the supernatant was analyzed for the presence of Butyrate, and cells were saved to measure enzyme activity.

TABLE 61
Butyrate Production.

| Strain: | Plasmid(s) | mg/L produced |
|---|---|---|
| 1 | pACYC (Empty vector), | 0 |
| | pET28B (empty vector) | |
| 2 | pACYC (Empty vector), | 0 |
| | pET28B (ptb-buk) | |
| 3 | pACYC (pT7But4 (phaA, | 0 |
| | hbd, crt, ter), pET28B (ptb-buk) | |
| 4 | pACYC (pT7But7 (nphT7, | 8-10 mg/L in 18 h |
| | hbd, crt, ter), pET28B (ptb-buk) | 10 mg/L-14 mg/L in 24 h |
| | | (OD = 3-6) |
| 5 | pACYC (pT7But7 (nphT07, | 528 mg/L in 20 h |
| | hbd, crt, ter), pET28B (ptb-buk) | (OD~5) |

### Example 75

### NADPH Dependent Butyrate Production Via Malonyl-coA in Strains with Combinations of FAS Mutations

[0770] The following genetically modified E. coli strains (listed in Table 62) were constructed form a wild type BW25113 starting host. E. coli BW25113 was obtained from the Yale genetic stock center (New Haven, Conn., USA). These strains were constructed by standard methods such as discussed in the Common Methods Section and also known in the art as referenced above. Briefly, chromosomal modifications were constructed via homologous recombination.

[0771] The following plasmids can be constructed by gene synthesis (Genscript, Piscataway, N.J.). The target gene sequences were ordered (Genscript, Piscataway, N.J.) including with modifications to the native ribosome binding site and subsequently changed to be compatible with existing expression vectors and to accommodate expression of key downstream gene(s) within the vector(s).

TABLE 62
Strain List 17

| Strain | Chromosomal genotype | Plasmid 1 | Plasmid 2 |
|---|---|---|---|
| 1 | F-, Δ(araD-araB)567, | pACYC (empty) | pET28B |
| | ΔlacZ4787(::rrnB-3), LAM-, | | (empty) |
| | rph-1, Δ(rhaD-rhaB)568, | | |
| | hsdR514, ΔldhA::frt, | | |
| | ΔpflB::frt, ΔmgsA::frt, | | |
| | ΔpoxB::frt, Δpta-ack::frt, | | |
| | fabI(ts)-(S241F)-zeoR, | | |
| | ΔfadD::frt, lambda-DES; | | |
| | ΔatoDAEB::frt | | |
| 2 | F-, Δ(araD-araB)567, | pACYC(npht07- | pET28B (ptb- |
| | ΔlacZ4787(::rrnB-3), | phaB-ech2-crr) | buk) |
| | LAM-, rph-1, Δ(rhaD- | | |
| | rhaB)568, hsdR514, | | |
| | ΔldhA::frt, ΔpflB::frt, | | |
| | ΔmgsA::frt, | | |
| | ΔpoxB::frt, Δpta- | | |
| | ack::frt, fabI(ts)- | | |
| | (S241F)-zeoR, | | |
| | ΔfadD::frt, lambda- | | |
| | DE3; ΔatoDAEB::frt | | |

[0772] The above strains can be evaluated in shake flasks for the production of butyrate. Briefly, overnight starter cultures can be made in 50 mL of Luria Broth including the appropriate antibiotics and incubated 16-24 hours are 30° C., while shaking at 225 rpm. These cultures are used to inoculate 3×50 mL cultures of each strain in SM11 minimal medium with 5% culture as starting inoculum, and antibiotics. The cultures are grown at 30° C. for approximately 4 h to an OD of 0.4-0.6 and then induced with IPTG (0.5 mM), after 1 h cells are shifted to 37° C. and monitored for 28 hours. Samples are taken at 18 h and 28 h and the supernatant is analyzed for the presence of Butyrate, and cells are saved to measure enzyme activity.

### Example 76

### C10- and C14-Free Fatty Acids Production by Using Trypanosoma Brucei Elongases in E. coli Host Cells that are Genetically Engineered for Production of Butyryl-CoA and Malonyl-CoA

[0773] E. coli host cells that are genetically engineered for production of butyryl-CoA and malonyl-CoA have been described above. The genes encoding Trypanosoma brucei elongases, ELO (SEQ ID NO: 199), ELO2 (SEQ ID NO: 200), and ELO3 (SEQ ID NO: 201), can be amplified from T. brucei genomic DNA and cloned into appropriate E. coli expression vectors. Alternatively, ELO1, ELO2, and ELO3 can be synthesized chemically, codon-optimized for expression in E. coli, and cloned into appropriate E. coli expression vectors.

[0774] Genetically modified E. coli host cells with T. brucei ELO1, ELO2, and ELO3 alone will not be able to produce C10- and C14-free fatty acids, since accessory enzymes are needed. First, enzymes know as β-ketoacyl-CoA reductase, β-hydroxyacyl-CoA dehydratase, and enoyl-acyl-CoA reductase are required to work together with T. brucei ELO1 and/or ELO2 for biotransformation of butyryl-CoA and malonyl-CoA into C10- and C14-CoAs. Saccharomyces cerevisiae possess β-ketoacyl-CoA reductase, β-hydroxyacyl-CoA dehydratase, and enoyl-acyl-CoA reductase (YBR159W (SEQ ID NO: 202), PHS1 (SEQ ID NO: 203), TSC13 (SEQ ID NO: 204), respectively) that will function together with T. brucei ELO1 and ELO2. Genes encoding β-ketoacyl-CoA reductase (SEQ ID NO: 205), β-hydroxyacyl-CoA dehydratase (SEQ ID NO: 206), and enoyl-acyl-CoA reductase (SEQ ID NO: 207) are also present in T. brucei genomes. Genes encoding these 3 enzymes can be PCR-amplified from S. cerevisiae or T. brucei genomic DNA.

[0775] Alternatively, these genes can be synthesized chemically and codon-optimized for expression in E. coli. Genes encoding these 3 accessory enzymes can be cloned into a different E. coli expression vector that is compatible with the E. coli expression vector carrying T. brucei ELO1 and ELO2 genes. Alternatively, genes encoding these 3 accessory enzymes can be cloned into the same expression vector carrying T. brucei ELO1 and ELO2 genes. In the latter case, genes of ELO1, ELO2, β-ketoacyl-CoA reductase, β-hydroxyacyl-CoA dehydratase, and enoyl-acyl-CoA reductase will be under regulation of a single promoter and transcribed together in a polycistronic mRNA.

[0776] Second, a thioesterase is needed to convert C10- and C14-CoAs produced by ELO1, ELO2, β-ketoacyl-CoA reductase, β-hydroxyacyl-CoA dehydratase, and enoyl-acyl-CoA reductase into C10- and C14-free fatty acids. E. coli tesA encodes a thioesterase that is naturally expressed in the periplasm. A truncated version of tesA in which the secretion signal is removed (designated as ‘tesA) will allow expression of a TesA protein in E. coli cytoplasm (SEQ ID NO: 208). Alternatively, a second E. coli thioesterase gene known as tesB (SEQ ID NO: 209) can also be co-expressed with ELO1, ELO2, β-ketoacyl-CoA reductase, β-hydroxyacyl-CoA dehydratase, and enoyl-acyl-CoA reductase. Genes of either tesA or tesB are amplified by PCR from E. coli genome or chemically synthesized, and cloned into an expression vector that is compatible with the plasmids carrying ELO1, ELO2, β-ketoacyl-CoA reductase, β-hydroxyacyl-CoA dehydratase, and enoyl-acyl-CoA reductase. Alternatively, tesA or tesB can be cloned into the same plasmid carrying ELO1, ELO2, β-ketoacyl-CoA reductase, β-hydroxyacyl-CoA dehydratase, and enoyl-acyl-CoA reductase. In the latter case, all genes will be under regulation of a single promoter and transcribed together in a polycistronic mRNA.

[0777] Expression plasmids carrying T. brucei ELO1, β-ketoacyl-CoA reductase, β-hydroxyacyl-CoA dehydratase, enoyl-acyl-CoA reductase, and either tesA or tesB are transformed into the butyryl- and malonyl-CoA-producing E. coli host cells described above, giving rise to transformants that will produce C10-free fatty acid. In a separate experiment, expression plasmids carrying T. brucei ELO1 plus ELO2 with and without ELO3, β-ketoacyl-CoA reductase, β-hydroxyacyl-CoA dehydratase, enoyl-acyl-CoA reductase, and either tesA or tesB are transformed into the butyryl- and malonyl-CoA-producing E. coli host cells described above, giving rise to transformants that will produce C10-, C14-, and C-18 free fatty acids.

[0778] The two different types of transformants are cultured independently in a suitable medium, such as LB broth at 37° C. Appropriate concentrations of antibiotics are included in the medium to keep the expression plasmids inside E. coli host cells. Expression of ELO1, ELO2, ELO3, and all accessory enzymes are induced by adding the appropriate inducers, such as IPTG, to the culture. Induced cultures are incubated at temperature between 15° C. to 37° C., for 1-7 days.

[0779] Transformants expressing ELO1, β-ketoacyl-CoA reductase, β-hydroxyacyl-CoA dehydratase, enoyl-acyl-CoA reductase, and either tesA or tesB are capable of secreting C10-fatty acid into the medium. Transformants expressing ELO1, ELO2, β-ketoacyl-CoA reductase, β-hydroxyacyl-CoA dehydratase, enoyl-acyl-CoA reductase, and either tesA or tesB are capable of secreting C10- and C14-fatty acids into the medium. Transformants expressing ELO1, ELO2, ELO3, β-ketoacyl-CoA reductase, β-hydroxyacyl-CoA dehydratase, enoyl-acyl-CoA reductase, and either tesA or tesB are capable of secreting C10-, C14-, and C-18 fatty acids into the medium.

[0780] While preferred embodiments of the present invention have been shown and described herein, such embodiments are provided by way of example only. Numerous variations, changes, and substitutions may be made without departing from the invention. It should be understood that various alternatives to the embodiments of the invention described herein may be employed in practicing the invention. It is intended that the following claims define the scope of the invention and that methods and structures within the scope of these claims and their equivalents be covered thereby.

1.-45. (canceled)

46. A method for producing a C4-C18 fatty acid or fatty acid derivative comprising:
combining a carbon source, a microorganism, and a cell culture to produce the C4-C18 fatty acid, wherein
a) said cell culture comprises an inhibitor of fatty acid synthase and/or the microorganism is genetically modified for reduced enzymatic activity in at least one of the microorganism's native fatty acid synthase pathway enzymes, providing for reduced conversion of malonyl-CoA to fatty acyl-ACPs; and
b) the microorganism additionally has one or more genetic modifications increasing fatty acid production.

47. A method for producing a fatty acid or fatty acid derivative comprising:
combining a carbon source, a microorganism, and a cell culture to produce the fatty acid, wherein
a) said cell culture comprises an inhibitor of fatty acid synthase and/or the microorganism is genetically modified for reduced enzymatic activity in at least one of the microorganism's native fatty acid synthase pathway enzymes, providing for reduced conversion of malonyl-CoA to fatty acyl-ACPs; and
b) the microorganism additionally has one or more genetic modifications providing for increased conversion of malonyl-CoA to fatty acyl-CoAs, thereby increasing fatty acid production through a non-native fatty acid production pathway.

48. The method of claim 46 or 47, wherein the at least one fatty acid synthase pathway enzymes with reduced enzymatic activity is selected from the group consisting of: a beta-ketoacyl-ACP synthase, enoyl-ACP reductase, malonyl-coA-ACP transacylase, β-ketoacyl-ACP reductase, and β-hydroxyacyl-ACP dehydratase.

49. The method of claim 46 or 47, wherein the native fatty acid synthase pathway enzyme is selected from the group consisting of: fabI, a polypeptide of 80% or more homology to SEQ ID NO: 14, fabB, a polypeptide of 80% or more homology to SEQ ID NO: 9, fabF, a polypeptide of 80% or more homology to SEQ ID NO: 8, fabD, and a polypeptide of 80% or more homology to SEQ ID NO: 7.

50. The method of claim 48, wherein the enoyl-ACP reductase is fabI or a polypeptide of 80% or more homology to SEQ ID NO: 14, the beta-ketoacyl-ACP synthase is selected from the group consisting of fabB or a polypeptide of 80% homology or more to SEQ ID NO: 9, and fabF or a polypeptide of 80% homology or more to SEQ ID NO: 8, and the malonyl-coA-ACP transacylase is fabD or a polypeptide of 80% or more homology to SEQ ID NO: 7.

51. The method of claim 49 or 50 wherein fabI, fabB, and fabD are temperature-sensitive mutants.

52. The method of claim 51, wherein the native fatty acid synthase pathway enzyme is a mutant temperature-sensitive fabI of E. coli having 80% homology or more to SEQ ID NO: 28 or SEQ ID NO: 29.

53. The method of claim 46, wherein the C4-C18 fatty acid is selected from the group consisting of C4, C6, C8, C10, C12, C14, C16, and C18 fatty acids.

54. The method of claim 47, wherein the genetic modifications providing for increased conversion of malonyl-CoA to fatty acyl-CoAs comprises genetic modifications to increase β-ketoacyl-CoA reductase activity, increase β-hydroxyacyl-CoA dehydratase activity, and increase enoyl-acyl-CoA reductase activity

55. The method of claim 54 wherein the microorganism further comprises increased thioesterase activity.

56. The method of claim 55 wherein the thioesterase is selected from the group consisting of tesA, ‘tesA, and tesB.

57. The method of claim 46 or 47, wherein the microorganism is genetically modified for increased enzymatic activity of an enzyme selected from the group consisting of: hbd, fadJ, crt, ech, and ter.

58. The method of any of claims 1-57, wherein the microorganism is E. coli.

59. The method of any one of claims 1-58, wherein the microorganism is further genetically modified to have modified malonyl-CoA dependent acetoacetyl-CoA synthase activity.

60. The method of claim 59, wherein the modified malonyl-CoA dependent acetoacetyl CoA synthase is nphT7 or a polypeptide of 80% or more homology to nphT7.

61. The method of any one of claims 1-60, wherein the microorganism is further genetically modified to have altered elongase activity.

62. The method of claim 61, wherein the microorganism has one or more modifications in the group consisting of: elo1, elo2, and elo3, or a polypeptide of 80% or more homology to a polypeptide from SEQ ID NOs: 199-201.

63. The method of any one of claims 1-62, wherein acetoacetyl-CoA is converted to a linear acyl-CoA with a chain length from 4-18 carbons.

64. The method of any one of claims 1-62, wherein the fatty acid derivative is selected from the group consisting of a fatty aldehyde, a fatty alcohol, and a fatty acid ester.

65. The method of claim 64, wherein the chemical is produced at a concentration higher than a concentration of said chemical produced by a wild type microorganism.

66. A genetically modified microorganism for use according to any one of claims 1-65.

67. The genetically modified microorganism of claim 66, wherein said microorganism comprises a sequence selected from group consisting of: SEQ ID NO: 1-215 or a sequence of 80% or more homology to SEQ ID NO: 1-215.

68. The genetically modified microorganism of claim 66, wherein said microorganism comprises at least one, two, three, four, five, six, seven, eight, nine, ten, or more sequences selected from group consisting of SEQ ID NO: 1-215 or sequences of 80% or more homology to SEQ ID NO: 1-215.

69. The method of any one of claims 1-65, wherein the microorganism is further genetically modified to induce enzyme expression from the yibD gene promoter with a decreased environmental phosphate concentration.

70. A consumer product produced from the fatty acid or fatty acid derivative of claim 46 or 47.

71. A consumer product of claim 70, wherein the product is selected from the group consisting of: a detergent, soap, resin, emulsifier, lubricant, grease, and wax.

The application's sequence listing, which the Patent Office published only in electronic form, follows.

SEQUENCE LISTING (215 sequences)

SEQ ID NO: 1 - DNA, 5385 bp, Artificial Sequence
  Description of Artificial Sequence: Synthetic pTrc-pTrc_THNS Ligation of inverted Flaviolin into pTrc vector polynucleotide supplied by Invitrogen
gtttgacagcttatcatcgactgcacggtgcaccaatgcttctggcgtcaggcagccatcggaagctgtggtatggctgtgcaggtcgtaaatcactgcataattcgtgtcgctcaaggcgcactcccgttctggataatgttttttgcgccgacatcataacggttctggcaaatattctgaaatgagctgttgacaattaatcatccggctcgtataatgtgtggaattgtgagcggataacaatttcacacaggaaacagcgccgctgagaaaaagcgaagcggcactgctctttaacaatttatcagacaatctgtgtgggcactcgaccggaattatcgattaactttattattaaaaattaaagaggtatatattaatgtatcgattaaataaggaggaataaaccatgaccactctgtgccgccctagcgttagcgtcccggaacacgtgattaccatggaggaaacgctggaactggcgcgtcgtcgtcatacggatcatccgcagctgccgctggctttgcgtctgatcgagaataccggcgtgcgcactcgtcacattgttcagccaattgaggacacgctggagcatccgggtttcgaggaccgcaacaaagtctatgaacgtgaagccaagagccgcgttccggctgtgatccagcgtgccctggacgatgcagaactgctggctacggatattgatgttatcatctacgtgagctgcacgggttttatgatgccgagcctgaccgcgtggttgattaacgagatgggtttcgactccaccacccgtcaaatcccgattgcgcagctgggttgtgcagcgggtggtgcggcgatcaaccgtgcccatgatttttgcaccgcgtacccggaagccaatgcactgatcgtcgcttgcgaattctgtagcctgtgctatcagccgaccgacttgggtgtgggtagcttgctgtgcaacggtctgttcggcgatggcattgcagcggccgtggttcgcggtcgtggtggcaccggtgttcgcctggaacgtaatggttcttacctgattccgaaaaccgaagattggattatgtatgatgtgaaggcgacgggtttccattttctgctggacaagcgtgtcccggcgaccatggaaccgttggctccggcactgaaagagctggctggtgagcacggctgggacgccagcgatctggacttctacattgtgcacgcgggtggtccgcgtattctggatgacctgagcacctttctggaagtcgaccctcacgcattccgcttttcccgtgcaacgctgacggagtacggcaatatcgcaagcgcggttgttttggacgcactgcgtcgtctgttcgacgagggtggtgttgaggaaggcgcacgcggcttgctggcgggttttggtccgggtattactgcagaaatgagcctgggttgttggcagaccgccgatgttcgtcgcggcatccgccaagatgtgacccgcacggcggcacgtggcgttagccgccgtgtgcgtcaagcttggctgttttggcggatgagagaagattttcagcctgatacagattaaatcagaacgcagaagcggtctgataaaacagaatttgcctggcggcagtagcgcggtggtcccacctgaccccatgccgaactcagaagtgaaacgccgtagcgccgatggtagtgtggggtctccccatgcgagagtagggaactgccaggcatcaaataaaacgaaaggctcagtcgaaagactgggcctttcgttttatctgttgtttgtcggtgaacgctctcctgagtaggacaaatccgccgggagcggatttgaacgttgcgaagcaacggcccggagggtggcgggcaggacgcccgccataaactgccaggcatcaaattaagcagaaggccatcctgacggatggcctttttgcgtttctacaaactctttttgtttatttttctaaatacattcaaatatgtatccgctcatgagacaataaccctgataaatgcttcaataatattgaaaaaggaagagtatgagtattcaacatttccgtgtcgcccttattcccttttttgcggcattttgccttcctgtttttgctcacccagaaacgctggtgaaagtaaaagatgctgaagatcagttgggtgcacgagtgggttacatcgaactggatctcaacagcggtaagatccttgagagttttcgccccgaagaacgttttccaatgatgagcacttttaaagttctgctatgtggcgcggtattatcccgtgttgacgccgggcaagagcaactcggtcgccgcatacactattctcagaatgacttggttgagtactcaccagtcacagaaaagcatcttacggatggcatgacagtaagagaattatgcagtgctgccataaccatgagtgataacactgcggccaacttacttctgacaacgatcggaggaccgaaggagctaaccgcttttttgcacaacatgggggatcatgtaactcgccttgatcgttgggaaccggagctgaatgaagccataccaaacgacgagcgtgacaccacgatgcctgtagcaatggcaacaacgttgcgcaaactattaactggcgaactacttactctagcttcccggcaacaattaatagactggatggaggcggataaagttgcaggaccacttctgcgctcggcccttccggctggctggtttattgctgataaatctggagccggtgagcgtgggtctcgcggtatcattgcagcactggggccagatggtaagccctcccgtatcgtagttatctacacgacggggagtcaggcaactatggatgaacgaaatagacagatcgctgagataggtgcctcactgattaagcattggtaactgtcagaccaagtttactcatatatactttagattgatttaaaacttcatttttaatttaaaaggatctaggtgaagatcctttttgataatctcatgaccaaaatcccttaacgtgagttttcgttccactgagcgtcagaccccgtagaaaagatcaaaggatcttcttgagatcctttttttctgcgcgtaatctgctgcttgcaaacaaaaaaaccaccgctaccagcggtggtttgtttgccggatcaagagctaccaactctttttccgaaggtaactggcttcagcagagcgcagataccaaatactgtccttctagtgtagccgtagttaggccaccacttcaagaactctgtagcaccgcctacatacctcgctctgctaatcctgttaccagtggctgctgccagtggcgataagtcgtgtcttaccgggttggactcaagacgatagttaccggataaggcgcagcggtcgggctgaacggggggttcgtgcacacagcccagcttggagcgaacgacctacaccgaactgagatacctacagcgtgagctatgagaaagcgccacgcttcccgaagggagaaaggcggacaggtatccggtaagcggcagggtcggaacaggagagcgcacgagggagcttccagggggaaacgcctggtatctttatagtcctgtcgggtttcgccacctctgacttgagcgtcgatttttgtgatgctcgtcaggggggcggagcctatggaaaaacgccagcaacgcggcctttttacggttcctggccttttgctggccttttgctcacatgttctttcctgcgttatcccctgattctgtggataaccgtattaccgcctttgagtgagctgataccgctcgccgcagccgaacgaccgagcgcagcgagtcagtgagcgaggaagcggaagagcgcctgatgcggtattttctccttacgcatctgtgcggtatttcacaccgcatatggtgcactctcagtacaatctgctctgatgccgcatagttaagccagtatacactccgctatcgctacgtgactgggtcatggctgcgccccgacacccgccaacacccgctgacgcgccctgacgggcttgtctgctcccggcatccgcttacagacaagctgtgaccgtctccgggagctgcatgtgtcagaggttttcaccgtcatcaccgaaacgcgcgaggcagcagatcaattcgcgcgcgaaggcgaagcggcatgcatttacgttgacaccatcgaatggtgcaaaacctttcgcggtatggcatgatagcgcccggaagagagtcaattcagggtggtgaatgtgaaaccagtaacgttatacgatgtcgcagagtatgccggtgtctcttatcagaccgtttcccgcgtggtgaaccaggccagccacgtttctgcgaaaacgcgggaaaaagtggaagcggcgatggcggagctgaattacattcccaaccgcgtggcacaacaactggcgggcaaacagtcgttgctgattggcgttgccacctccagtctggccctgcacgcgccgtcgcaaattgtcgcggcgattaaatctcgcgccgatcaactgggtgccagcgtggtggtgtcgatggtagaacgaagcggcgtcgaagcctgtaaagcggcggtgcacaatcttctcgcgcaacgcgtcagtgggctgatcattaactatccgctggatgaccaggatgccattgctgtggaagctgcctgcactaatgttccggcgttatttcttgatgtctctgaccagacacccatcaacagtattattttctcccatgaagacggtacgcgactgggcgtggagcatctggtcgcattgggtcaccagcaaatcgcgctgttagcgggcccattaagttctgtctcggcgcgtctgcgtctggctggctggcataaatatctcactcgcaatcaaattcagccgatagcggaacgggaaggcgactggagtgccatgtccggttttcaacaaaccatgcaaatgctgaatgagggcatcgttcccactgcgatgctggttgccaacgatcagatggcgctgggcgcaatgcgcgccattaccgagtccgggctgcgcgttggtgcggatatctcggtagtgggatacgacgataccgaagacagctcatgttatatcccgccgtcaaccaccatcaaacaggattttcgcctgctggggcaaaccagcgtggaccgcttgctgcaactctctcagggccaggcggtgaagggcaatcagctgttgcccgtctcactggtgaaaagaaaaaccaccctggcgcccaatacgcaaaccgcctctccccgcgcgttggccgattcattaatgcagctggcacgacaggtttcccgactggaaagcgggcagtgagcgcaacgcaattaatgtgagttagcgcgaattgatctg

SEQ ID NO: 2 - DNA, 8145 bp, Artificial Sequence
  Description of Artificial Sequence: Synthetic pACYC-accABCD Pj251-cat-PtPiA-AccAD-PrpiA-AaccBC polynucleotide
gcttttagaaaaactcatcgagcatcaaatgaaactgcaatttattcatatcaggattatcaataccatatttttgaaaaagccgtttctgtaatgaaggagaaaactcaccgaggcagttccataggatggcaagatcctggtatcggtctgcgattccgactcgtccaacatcaatacaacctattattgtaaaacgacggccagtgagcgcgcgtaatacgactcactatagggcgaattggagctcccgcggtgcggccgctctagaactagtggatcccccgggctgcagcgaccaatgtggaattcgcccttggcacgtgcgaagttcctattctctaggaaagtataggaacttcgaggcttttgacttgagggggatccacgcgtttacgccccgccctgccactcatcgcagtactgttgtaattcattaagcattctgccgacatggaagccatcacaaacggcatgatgaacctgaatcgccagcggcatcagcaccttgtcgccttgcgtataatatttgcccatggtgaaaacgggggcgaagaagttgtccatattggccacgtttaaatcaaaactggtgaaactcacccagggattggctgagacgaaaaacatattctcaataaaccctttagggaaataggccaggttttcaccgtaacacgccacatcttgcgaatatatgtgtagaaactgccggaaatcgtcgtggtattcactccagagcgatgaaaacgtttcagtttgctcatggaaaacggtgtaacaagggtgaacactatcccatatcaccagctcaccgtctttcattgccatacggaattccggatgagcattcatcaggcgggcaagaatgtgaataaaggccggataaaacttgtgcttatttttctttacggtctttaaaaaggccgtaatatccagctgaacggtctggttataggtacattgagcaactgactgaaatgcctcaaaatgttctttacgatgccattgggatatatcaacggtggtatatccagtgatttttttctccattttagcttccttagctcctgaaaatctcgataactcaaaaaatacgcccggtagtgatcttatttcattatggtgaaagttggaacctcttacgaagttcctatactttctagagaataggaacttcgcacgtgccaagggcgaattccacagtggatatcaagcttatcgataccgtcgacctcgagggggggcccggtacccagcttttgttccctttagtgagggttaattgcgcgcttggcgtaatcatggtcatagctgtttccatcaggatattcttctaatacctggaacgctgtttttccggggatcgcagtggtgagtaaccatgcatcatcaggagtacggataaaatgcttgatggtcggaagtggcataaattccgtcagccagtttagtctgaccatctcatctgtaacatcattggcaacgctacctttgccatgtttcagaaacaactctggcgcatcgggcttcccatacaagcgatagattgtcgcacctgattgcccgacattatcgcgagcccatttatacccatataaatcagcatccatgttggaatttaatcgcggcctcgacgtttcccgttgaatatggctcatattcttcctttttcaatattattgaagcatttatcagggttattgtctcatgagcggatacatatttgaatgtatttagaaaaataaacaaataggggtcagtgttacaaccaattaaccaattctgaacattatcgcgagcccatttatacctgaatatggctcataacaccccttgtttgcctggcggcagtagcgcggtggtcccacctgaccccatgccgaactcagaagtgaaacgccgtagcgccgatggtagtgtggggactccccatgcgagagtagggaactgccaggcatcaaataaaacgaaaggctcagtcgaaagactgggcctttcgcccgggctaattagggggtgtcgcccttattcgactctatagggaagttcctattctctagaaagtataggaacttctgaaggggggacagctgtctcaaatgtctcggaatcgctgacgattcccaggtttctccggcaagcatagcgcatggcgtctccatgcgagaatgtcgcgcttgccggataaaaggggagccgctatcggaatggacgcaagccacggccgcagcaggtgcggtcgagggcttccagccagttccagggcagatgtgccggcagaccctcccgctttgggggaggcgcaagccgggtccattcggatagcatctccccatgcaaagtgccggccagggcaatgcccggagccggttcgaggcgccggtttgaataaatgacaaaaagcaaagcctttgtgccgatgaatctctatactgtttcacagacctgctgccctgcggggcggccatcttcctttattcgcttataagcgcggggcaggaggaaaaacatgtccctgaacttcctggacttcgagcagccgattgcagaactggaagcgaagattgacagcctgaccgcggttagccgtcaagatgagaaactggacattaacatcgacgaagaggtccaccgtttgcgtgagaagtctgttgaactgactcgcaaaatctttgctgatttgggcgcatggcagattgcccagttggctcgccacccacaacgcccatataccctggactacgtgcgcctggcgtttgacgagttcgacgaactggcaggcgaccgcgcctatgcggacgataaagcaattgtcggcggtattgctcgtttggatggccgtccggtgatgattatcggccatcaaaaaggccgcgagacgaaagaaaagattcgtcgtaactttggtatgccggcaccggagggctaccgcaaggccctgcgtctgatgcaaatggccgaacgctttaagatgccgattatcacgttcattgatacgccgggtgcgtacccaggcgttggtgcggaagagcgtggtcagagcgaggccatcgcacgtaacctgcgtgagatgtctcgtctgggtgtgccggtcgtttgcaccgtgattggcgagggcggtagcggtggtgcgttggcgatcggtgtcggtgataaggtcaacatgctgcaatacagcacgtacagcgtcattagcccggaaggttgcgcttccattctgtggaagagcgcggataaagcaccattggcagcggaagcgatgggtatcatcgcaccgcgtctgaaagaactgaagttgattgattctatcatcccggaaccgctgggcggtgctcaccgtaatccggaggcgatggcagccagcctgaaggcccagctgctggcggacctggcggatctggacgtgctgagcacggaggatctgaaaaaccgtcgctatcagcgcttgatgagctatggctacgcgtagtaaaggaggaaaatcatgagctggattgaacgcattaagtccaatatcaccccgacccgcaaggcgagcatccctgaaggcgtctggaccaaatgcgatagctgcggtcaggttttgtatcgtgcggagctggagcgtaacctggaagtgtgcccgaaatgcgaccatcacatgcgtatgaccgctcgtaatcgtctgcatagcctgctggatgagggcagcctggtcgagctgggtagcgaactggaaccgaaagatgttctgaaattccgtgattccaagaagtataaggatcgtttggcatctgcacaaaaagaaaccggtgagaaggacgcactggttgttatgaaaggcaccctgtatggtatgccggttgttgctgcggcgttcgagtttgcgtttatgggtggcagcatgggttccgtggtgggcgcacgctttgtgcgtgccgtggagcaggcgctggaggataactgtcctctgatttgtttcagcgcgagcggtggtgcgcgtatgcaagaggccctgatgagcctgatgcagatggcaaaaacctcggcagccctggcgaagatgcaagaacgcggcctgccgtacatttccgtcctgaccgaccctacgatgggcggtgtcagcgccagctttgcgatgctgggtgatttgaacatcgcagagccgaaggctctgattggttttgctggtccgcgtgttattgaacagacggttcgcgaaaagttgccgcctggtttccagcgcagcgagttcctgattgagaaaggtgccatcgacatgatcgttcgccgtccagaaatgcgtctgaaactggcgagcattctggcgaaattgatgaatctgccggctccgaatcctgaagcaccgcgtgagggtgtcgtggttccgccggtcccggaccaagagccggaggcataatagcacgtggagttaaccacgcggcttgccaacggggtctgaatcgctttttttgtatataatgcgtgtgaaatttcataccacaggcgaaggaggaaaaaccatggacattcgtaagatcaagaaactgattgaactggttgaagaaagcggcatcagcgagctggagatcagcgaaggtgaagagagcgtccgtatttcccgtgcggcaccggcagcgagctttccggttatgcagcaagcatacgccgctccgatgatgcaacagccggcacagagcaacgccgctgcaccggcgaccgttccaagcatggaggcaccggcagcggccgagatttcgggtcatatcgtgcgtagcccgatggtgggcaccttctatcgcacgccgtcgccggacgcaaaagccttcatcgaagtcggccagaaggtcaatgtcggcgacacgctgtgtatcgttgaggcaatgaaaatgatgaaccagattgaagcggataagagcggtactgttaaagcgatcctggtggaatccggccagcctgttgagttcgatgaaccgctggttgtgatcgagtaacgaggcgaacatgttggacaagatcgtgattgcaaaccgcggtgaaatcgcgctgcgtatcttgcgcgcgtgtaaagagctgggcattaagactgttgccgtgcattccagcgcagaccgcgacctgaagcatgttctgctggccgacgaaacggtttgcatcggtccggcaccgagcgtgaaaagctatctgaacatcccggccatcatctctgcggcagagatcaccggtgcagtggcgattcatccgggctacggtttcctgagcgagaacgctaactttgctgaacaagtggagcgtagcggtttcatcttcattggccctaaggcggagacgattcgcctgatgggcgacaaagtgagcgccattgcagcgatgaaaaaggccggtgtgccgtgtgttccgggcagcgatggtccgctgggtgacgatatggacaagaaccgtgccatcgctaaacgtattggctacccggtcattatcaaagcctctggtggtggcggtggccgtggtatgcgtgtcgtccgtggtgatgcggaactggcgcaaagcatcagcatgacccgtgcggaagccaaagcggcgttctctaacgatatggtgtatatggagaagtatctggagaatccgcgccacgttgaaatccaagttctggcggatggtcagggcaatgcgatctacttggcagaacgtgattgctccatgcaacgccgtcatcagaaggtggtggaagaggcaccggctccgggtattacgccggaactgcgtcgctacatcggtgagcgctgtgcgaaagcgtgtgtggacattggttaccgtggtgcgggtacgtttgagttcctgttcgaaaatggtgagttttacttcattgaaatgaatacccgcatccaggttgagcacccggtgaccgagatgattactggcgttgatctgatcaaagagcaactgcgcattgcggctggtcagccgctgtcgatcaagcaagaagaggtgcacgttcgtggtcacgcggtcgagtgccgtatcaatgcggaggacccgaatacctttctgccgagccctggtaagatcacgcgttttcacgcgccaggtggttttggcgttcgttgggagtctcacatctacgccggttacaccgtgccgccgtactatgacagcatgattggtaaactgatctgctatggcgaaaatcgtgatgtcgcgatcgcccgcatgaaaaacgcgctgcaagagctgatcattgatggcattaagaccaatgtggatttgcagatccgcattatgaacgacgagaatttccagcacggcggtacgaacattcactacctggaaaagaaactgggcctgcaagagaaataatagggtaccctagcataaccccttggggcctctaaacgggtcttgaggggttttttgaatcccccgggatgtctatcttaaggtagccaaagtttaaactttggctaccttaagatagacatactgccggcctggttcaaccagtcggcagccggcgctggcgcccgcgtattgcggtgcagccagcgcggcgcacaaggcggcgggcgtttcgtttcgccgcccgtttcgcgggccgtcaaggcccgcgaatcgtttctgcccgcgcggcattcctcgctttttgcgccaattcaccgggttttccttaagccccgtcgcttttcttagtgccttgttgggcatagaatcagggcagcggcgcagccagcaccatgttcgtgcagcgcggccctcgcgggggcgaggctgcagacagctgtcaaaatgaagggaagttcctatactttctagagaataggaacttctatagggagtcgaataagggcgacacaaaaggtattctaaatgcataataaatactgataacatcttatagtttgtattatattttgtattatcgttgacatgtataattttgatatcaaaaactgattttccctttattattttcgagatttattttcttaattctctttaacaaactagaaatattgtatatacaaaaaatcataaataatagatgaatagtttaattataggtgttcatcaatcgaaaaagcaacgtatcttatttaaagtgcgttgcttttttctcatttataaggttaaataattctcatatatcaagcaaagtgacaggcgcccttaaatattctgacaaatgctctttccctaaactccccccataaaaaaacccgccgaagcgggtttttacgttatttgcggattaacgattactcgttatcagaaccgcccaggatgcctggcagttccctactctcgccgctgcgctcggtcgttcggctgcgggacctcagcgctagcggagtgtatactggcttactatgttggcactgatgagggtgtcagtgaagtgcttcatgtggcaggagaaaaaaggctgcaccggtgcgtcagcagaatatgtgatacaggatatattccgcttcctcgctcactgactcgctacgctcggtcgttcgactgcggcgagcggaaatggcttacgaacggggcggagatttcctggaagatgccaggaagatacttaacagggaagtgagagggccgcggcaaagccgtttttccataggctccgcccccctgacaagcatcacgaaatctgacgctcaaatcagtggtggcgaaacccgacaggactataaagataccaggcgtttccccctggcggctccctcgtgcgctctcctgttcctgcctttcggtttaccggtgtcattccgctgttatggccgcgtttgtctcattccacgcctgacactcagttccgggtaggcagttcgctccaagctggactgtatgcacgaaccccccgttcagtccgaccgctgcgccttatccggtaactatcgtcttgagtccaacccggaaagacatgcaaaagcaccactggcagcagccactggtaattgatttagaggagttagtcttgaagtcatgcgccggttaaggctaaactgaaaggacaagttttggtgactgcgctcctccaagccagttacctcggttcaaagagttggtagctcagagaaccttcgaaaaaccgccctgcaaggcggttttttcgttttcagagcaagagattacgcgcagaccaaaacgatctcaagaagatcatcttattaa

SEQ ID NO: 3 - DNA, 8894 bp, Artificial Sequence
  Description of Artificial Sequence: Synthetic pTrc-ptrc-mcr-kan polynucleotide
ccttcaactcagcaaaagttcgatttattcaacaaagccacgttgtgtctcaaaatctctgatgttacattgcacaagataaaaatatatcatcatgaacaataaaactgtctgcttacataaacagtaatacaaggggtgttatgagccatattcaacgggaaacgtcttgctcgaggccgcgattaaattccaacatggatgctgatttatatgggtataaatgggctcgcgataatgtcgggcaatcaggtgcgacaatctatcgattgtatgggaagcccgatgcgccagagttgtttctgaaacatggcaaaggtagcgttgccaatgatgttacagatgagatggtcagactaaactggctgacggaatttatgcctcttccgaccatcaagcattttatccgtactcctgatgatgcatggttactcaccactgcgatccccgggaaaacagcattccaggtattagaagaatatcctgattcaggtgaaaatattgttgatgcgctggcagtgttcctgcgccggttgcattcgattcctgtttgtaattgtccttttaacagcgatcgcgtatttcgtctcgctcaggcgcaatcacgaatgaataacggtttggttgatgcgagtgattttgatgacgagcgtaatggctggcctgttgaacaagtctggaaagaaatgcataagcttttgccattctcaccggattcagtcgtcactcatggtgatttctcacttgataaccttatttttgacgaggggaaattaataggttgtattgatgttggacgagtcggaatcgcagaccgataccaggatcttgccatcctatggaactgcctcggtgagttttctccttcattacagaaacggctttttcaaaaatatggtattgataatcctgatatgaataaattgcagtttcatttgatgctcgatgagtttttctaatcgagtcaggcaactatggatgaacgaaatagacagatcgctgagataggtgcctcactgattaagcattggtaactgtcagaccaagtttactcatatatactttagattgatttaaaacttcatttttaatttaaaaggatctaggtgaagatcctttttgataatctcatgaccaaaatcccttaacgtgagttttcgttccactgagcgtcagaccccgtagaaaagatcaaaggatcttcttgagatcctttttttctgcgcgtaatctgctgcttgcaaacaaaaaaaccaccgctaccagcggtggtttgtttgccggatcaagagctaccaactctttttccgaaggtaactggcttcagcagagcgcagataccaaatactgtccttctagtgtagccgtagttaggccaccacttcaagaactctgtagcaccgcctacatacctcgctctgctaatcctgttaccagtggctgctgccagtggcgataagtcgtgtcttaccgggttggactcaagacgatagttaccggataaggcgcagcggtcgggctgaacggggggttcgtgcacacagcccagcttggagcgaacgacctacaccgaactgagatacctacagcgtgagctatgagaaagcgccacgcttcccgaagggagaaaggcggacaggtatccggtaagcggcagggtcggaacaggagagcgcacgagggagcttccagggggaaacgcctggtatctttatagtcctgtcgggtttcgccacctctgacttgagcgtcgatttttgtgatgctcgtcaggggggcggagcctatggaaaaacgccagcaacgcggcctttttacggttcctggccttttgctggccttttgctcacatgttctttcctgcgttatcccctgattctgtggataaccgtattaccgcctttgagtgagctgataccgctcgccgcagccgaacgaccgagcgcagcgagtcagtgagcgaggaagcggaagagcgcctgatgcggtattttctccttacgcatctgtgcggtatttcacaccgcatatggtgcactctcagtacaatctgctctgatgccgcatagttaagccagtatacactccgctatcgctacgtgactgggtcatggctgcgccccgacacccgccaacacccgctgacgcgccctgacgggcttgtctgctcccggcatccgcttacagacaagctgtgaccgtctccgggagctgcatgtgtcagaggttttcaccgtcatcaccgaaacgcgcgaggcagcagatcaattcgcgcgcgaaggcgaagcggcatgcatttacgttgacaccatcgaatggtgcaaaacctttcgcggtatggcatgatagcgcccggaagagagtcaattcagggtggtgaatgtgaaaccagtaacgttatacgatgtcgcagagtatgccggtgtctcttatcagaccgtttcccgcgtggtgaaccaggccagccacgtttctgcgaaaacgcgggaaaaagtggaagcggcgatggcggagctgaattacattcccaaccgcgtggcacaacaactggcgggcaaacagtcgttgctgattggcgttgccacctccagtctggccctgcacgcgccgtcgcaaattgtcgcggcgattaaatctcgcgccgatcaactgggtgccagcgtggtggtgtcgatggtagaacgaagcggcgtcgaagcctgtaaagcggcggtgcacaatcttctcgcgcaacgcgtcagtgggctgatcattaactatccgctggatgaccaggatgccattgctgtggaagctgcctgcactaatgttccggcgttatttcttgatgtctctgaccagacacccatcaacagtattattttctcccatgaagacggtacgcgactgggcgtggagcatctggtcgcattgggtcaccagcaaatcgcgctgttagcgggcccattaagttctgtctcggcgcgtctgcgtctggctggctggcataaatatctcactcgcaatcaaattcagccgatagcggaacgggaaggcgactggagtgccatgtccggttttcaacaaaccatgcaaatgctgaatgagggcatcgttcccactgcgatgctggttgccaacgatcagatggcgctgggcgcaatgcgcgccattaccgagtccgggctgcgcgttggtgcggatatctcggtagtgggatacgacgataccgaagacagctcatgttatatcccgccgtcaaccaccatcaaacaggattttcgcctgctggggcaaaccagcgtggaccgcttgctgcaactctctcagggccaggcggtgaagggcaatcagctgttgcccgtctcactggtgaaaagaaaaaccaccctggcgcccaatacgcaaaccgcctctccccgcgcgttggccgattcattaatgcagctggcacgacaggtttcccgactggaaagcgggcagtgagcgcaacgcaattaatgtgagttagcgcgaattgatctggtttgacagcttatcatcgactgcacggtgcaccaatgcttctggcgtcaggcagccatcggaagctgtggtatggctgtgcaggtcgtaaatcactgcataattcgtgtcgctcaaggcgcactcccgttctggataatgttttttgcgccgacatcataacggttctggcaaatattctgaaatgagctgttgacaattaatcatccggctcgtataatgtgtggaattgtgagcggataacaatttcacacaggaaacagcgccgctgagaaaaagcgaagcggcactgctctttaacaatttatcagacaatctgtgtgggcactcgaccggaattatcgattaactttattattaaaaattaaagaggtatatattaatgtatcgattaaataaggaggaataaaccatggccggtacgggtcgtttggctggtaaaattgcattgatcaccggtggtgctggtaacattggttccgagctgacccgccgttttctggccgagggtgcgacggttattatcagcggccgtaaccgtgcgaagctgaccgcgctggccgagcgcatgcaagccgaggccggcgtgccggccaagcgcattgatttggaggtgatggatggttccgaccctgtggctgtccgtgccggtatcgaggcaatcgtcgctcgccacggtcagattgacattctggttaacaacgcgggctccgccggtgcccaacgtcgcttggcggaaattccgctgacggaggcagaattgggtccgggtgcggaggagactttgcacgcttcgatcgcgaatctgttgggcatgggttggcacctgatgcgtattgcggctccgcacatgccagttggctccgcagttatcaacgtttcgactattttctcgcgcgcagagtactatggtcgcattccgtacgttaccccgaaggcagcgctgaacgctttgtcccagctggctgcccgcgagctgggcgctcgtggcatccgcgttaacactattttcccaggtcctattgagtccgaccgcatccgtaccgtgtttcaacgtatggatcaactgaagggtcgcccggagggcgacaccgcccatcactttttgaacaccatgcgcctgtgccgcgcaaacgaccaaggcgctttggaacgccgctttccgtccgttggcgatgttgctgatgcggctgtgtttctggcttctgctgagagcgcggcactgtcgggtgagacgattgaggtcacccacggtatggaactgccggcgtgtagcgaaacctccttgttggcgcgtaccgatctgcgtaccatcgacgcgagcggtcgcactaccctgatttgcgctggcgatcaaattgaagaagttatggccctgacgggcatgctgcgtacgtgcggtagcgaagtgattatcggcttccgttctgcggctgccctggcgcaatttgagcaggcagtgaatgaatctcgccgtctggcaggtgcggatttcaccccgccgatcgctttgccgttggacccacgtgacccggccaccattgatgcggttttcgattggggcgcaggcgagaatacgggtggcatccatgcggcggtcattctgccggcaacctcccacgaaccggctccgtgcgtgattgaagtcgatgacgaacgcgtcctgaatttcctggccgatgaaattaccggcaccatcgttattgcgagccgtttggcgcgctattggcaatcccaacgcctgaccccgggtgcccgtgcccgcggtccgcgtgttatctttctgagcaacggtgccgatcaaaatggtaatgtttacggtcgtattcaatctgcggcgatcggtcaattgattcgcgtttggcgtcacgaggcggagttggactatcaacgtgcatccgccgcaggcgatcacgttctgccgccggtttgggcgaaccagattgtccgtttcgctaaccgctccctggaaggtctggagttcgcgtgcgcgtggaccgcacagctgctgcacagccaacgtcatattaacgaaattacgctgaacattccagccaatattagcgcgaccacgggcgcacgttccgccagcgtcggctgggccgagtccttgattggtctgcacctgggcaaggtggctctgattaccggtggttcggcgggcatcggtggtcaaatcggtcgtctgctggccttgtctggcgcgcgtgtgatgctggccgctcgcgatcgccataaattggaacagatgcaagccatgattcaaagcgaattggcggaggttggttataccgatgtggaggaccgtgtgcacatcgctccgggttgcgatgtgagcagcgaggcgcagctggcagatctggtggaacgtacgctgtccgcattcggtaccgtggattatttgattaataacgccggtattgcgggcgtggaggagatggtgatcgacatgccggtggaaggctggcgtcacaccctgtttgccaacctgatttcgaattattcgctgatgcgcaagttggcgccgctgatgaagaagcaaggtagcggttacatcctgaacgtttcttcctattttggcggtgagaaggacgcggcgattccttatccgaaccgcgccgactacgccgtctccaaggctggccaacgcgcgatggcggaagtgttcgctcgtttcctgggtccagagattcagatcaatgctattgccccaggtccggttgaaggcgaccgcctgcgtggtaccggtgagcgtccgggcctgtttgctcgtcgcgcccgtctgatcttggagaataaacgcctgaacgaattgcacgcggctttgattgctgcggcccgcaccgatgagcgctcgatgcacgagttggttgaattgttgctgccgaacgacgtggccgcgttggagcagaacccagcggcccctaccgcgctgcgtgagctggcacgccgcttccgtagcgaaggtgatccggcggcaagctcctcgtccgccttgctgaatcgctccatcgctgccaagctgttggctcgcttgcataacggtggctatgtgctgccggcggatatttttgcaaatctgcctaatccgccggacccgttctttacccgtgcgcaaattgaccgcgaagctcgcaaggtgcgtgatggtattatgggtatgctgtatctgcagcgtatgccaaccgagtttgacgtcgctatggcaaccgtgtactatctggccgatcgtaacgtgagcggcgaaactttccatccgtctggtggtttgcgctacgagcgtaccccgaccggtggcgagctgttcggcctgccatcgccggaacgtctggcggagctggttggtagcacggtgtacctgatcggtgaacacctgaccgagcacctgaacctgctggctcgtgcctatttggagcgctacggtgcccgtcaagtggtgatgattgttgagacggaaaccggtgcggaaaccatgcgtcgtctgttgcatgatcacgtcgaggcaggtcgcctgatgactattgtggcaggtgatcagattgaggcagcgattgaccaagcgatcacgcgctatggccgtccgggtccggtggtgtgcactccattccgtccactgccaaccgttccgctggtcggtcgtaaagactccgattggagcaccgttttgagcgaggcggaatttgcggaactgtgtgagcatcagctgacccaccatttccgtgttgctcgtaagatcgccttgtcggatggcgcgtcgctggcgttggttaccccggaaacgactgcgactagcaccacggagcaatttgctctggcgaacttcatcaagaccaccctgcacgcgttcaccgcgaccatcggtgttgagtcggagcgcaccgcgcaacgtattctgattaaccaggttgatctgacgcgccgcgcccgtgcggaagagccgcgtgacccgcacgagcgtcagcaggaattggaacgcttcattgaagccgttctgctggttaccgctccgctgcctcctgaggcagacacgcgctacgcaggccgtattcaccgcggtcgtgcgattaccgtctaatagaagcttggctgttttggcggatgagagaagattttcagcctgatacagattaaatcagaacgcagaagcggtctgataaaacagaatttgcctggcggcagtagcgcggtggtcccacctgaccccatgccgaactcagaagtgaaacgccgtagcgccgatggtagtgtggggtctccccatgcgagagtagggaactgccaggcatcaaataaaacgaaaggctcagtcgaaagactgggcctttcgttttatctgttgtttgtcggtgaacgctctcctgagtaggacaaatccgccgggagcggatttgaacgttgcgaagcaacggcccggagggtggcgggcaggacgcccgccataaactgccaggcatcaaattaagcagaaggccatcctgacggatggcctttttgcgtttctacaaactctttttgtttatttttctaaatacattcaaatatgtatccgctcatgagacaataaccctgataaatgcttcaataatattgaaaaaggaagagtatgagtattcaacatttccgtgtcgcccttattcccttttttgcggcattttgccttcctgtttttgctcacccagaaacgctggtgaaagtaaaagatgctgaagatcagttgggtgcacgagtgggttacatcgaactggatctcaacagcggtaagatccttgagagttttcgccccgaagaacgttttccaatgatgagcacttttaaagttctgctatgtggcgcggtattatcccgtgttgacgccgggcaagagcaactcggtcgccgcatacactattctcagaatgacttggttgagtactcaccagtcacagaaaagcatcttacggatggcatgacagtaagagaattatgcagtgctgccataaccatgagtgataacactgcggccaacttacttctgacaacgatcggaggaccgaaggagctaaccgcttttttgcacaacatgggggatcatgtaactcgccttgatcgttgggaaccggagctgaatgaagccataccaaacgacgagcgtgacaccacgatgcctgtagcaatggcaacaacgttgcgcaaactattaactggcgaactacttactctagcttcccggcaacaattaatagactggatggaggcggataaagttgcaggaccacttctgcgctcggcccttccggctggctggtttattgctgataaatctggagccggtgagcgtgggtctcgcggtatcattgcagcactggggccagatggtaagccctcccgtatcgtagttatctacacgacgg

SEQ ID NO: 4 - DNA, 10578 bp, Artificial Sequence
  Description of Artificial Sequence: Synthetic pACYC184-cat-PtpiA-accAD-PrpiA-accBC-patalA-pntAB polynucleotide
gaattccggatgagcattcatcaggcgggcaagaatgtgaataaaggccggataaaacttgtgcttatttttctttacggtctttaaaaaggccgtaatatccagctgaacggtctggttataggtacattgagcaactgactgaaatgcctcaaaatgttctttacgatgccattgggatatatcaacggtggtatatccagtgatttttttctccattttagcttccttagctcctgaaaatctcgataactcaaaaaatacgcccggtagtgatcttatttcattatggtgaaagttggaacctcttacgtgccgatcaacgtctcattttcgccaaaagttggcccagggcttcccggtatcaacagggacaccaggatttatttattctgcgaagtgatcttccgtcacaggtatttattcggcgcaaagtgcgtcgggtgatgctgccaacttactgatttagtgtatgatggtgtttttgaggtgctccagtggcttctgtttctatcagctgtccctcctgttcagctactgacggggtggtgcgtaacggcaaaagcaccgccggacatcagcgctagcggagtgtatactggcttactatgttggcactgatgagggtgtcagtgaagtgcttcatgtggcaggagaaaaaaggctgcaccggtgcgtcagcagaatatgtgatacaggatatattccgcttcctcgctcactgactcgctacgctcggtcgttcgactgcggcgagcggaaatggcttacgaacggggcggagatttcctggaagatgccaggaagatacttaacagggaagtgagagggccgcggcaaagccgtttttccataggctccgcccccctgacaagcatcacgaaatctgacgctcaaatcagtggtggcgaaacccgacaggactataaagataccaggcgtttccccctggcggctccctcgtgcgctctcctgttcctgcctttcggtttaccggtgtcattccgctgttatggccgcgtttgtctcattccacgcctgacactcagttccgggtaggcagttcgctccaagctggactgtatgcacgaaccccccgttcagtccgaccgctgcgccttatccggtaactatcgtcttgagtccaacccggaaagacatgcaaaagcaccactggcagcagccactggtaattgatttagaggagttagtcttgaagtcatgcgccggttaaggctaaactgaaaggacaagttttggtgactgcgctcctccaagccagttacctcggttcaaagagttggtagctcagagaaccttcgaaaaaccgccctgcaaggcggttttttcgttttcagagcaagagattacgcgcagaccaaaacgatctcaagaagatcatcttattaatcagataaaatatttctagatttcagtgcaatttatctcttcaaatgtagcacctgaagtcagccccatacgatataagttgtaattctcatgtttgacagcttatcatcgataagctttaatgcggtagtttatcacagttaaattgctaacgcagtcaggcaccgtgtatgaaatctaacaatgcgctcatcgtcatcctcggcaccgtcaccctggatgctgtaggcataggcttggttatgccggtactgccgggcctcttgcgggatttaagctcgggccccctgggcggttctgataacgagtaatcgttaatccgcaaataacgtaaaaacccgcttcggcgggtttttttatggggggagtttagggaaagagcatttgtcagaatatttaagggcgcctgtcactttgcttgatatatgagaattatttaaccttataaatgagaaaaaagcaacgcactttaaataagatacgttgctttttcgattgatgaacacctataattaaactattcatctattatttatgattttttgtatatacaatatttctagtttgttaaagagaattaagaaaataaatctcgaaaataataaagggaaaatcagtttttgatgggttacagagctttcaggattgcatccacgctggctttggcgtcaccaaacagcatgtgggtgttttccttgaagaacagcgggttttgcacaccagcatagccagtgttcatcgaacgtttaaagacaatcacgttctgcgctttccacacttccagcacaggcataccagcaatcggactcttcggatcatcctgcgccgccgggttaaccgtatcgttagcaccaatcaccagtacggtatcggtatcagcaaagtcatcattgatctcgtccatttccagcacgatgtcatacggtacttttgcttcagccagcaatacgttcatatgtccaggcaaacgccccgcgaccgggtggataccgaaacgcacattaataccacgagcgcgcaatttctcagtaatttcagcgacaggatattgcgcctgcgcgactgccatgccgtaccccggagtaatgatcactgaatgggagtttttcagcagttccgctgtctcttctgcggtgatttcgcggtgctcacccacttcctgatcatcgccagtagaagagccgtcggtgccgaaaccacccgcaataacgctgataaaggaacggttcatcgcctcacacataatgtaagaaaggatagcccccgaagaaccgaccagcgcaccggtcacaatcagcaggtcgttgctgagcataaagcccgcagccgcagccgcccagccggagtacgagttcagcatcgacaccaccactggcatatctgcaccaccgatggaggcgactaaatgccagccgaataccagcgcaattgcggtcattatcagcaatgccagcacttgcaggccgacgctgtccgtgcgaacaaatacaatcagcagcaggaaggaaacgaccagagccgccaggttcattttgtgacggtttggcagcatcaatggtttagacgaaatcttgccacacagtttgccgaacgccaccaccgaacccgtgaacgttaccgccccgatgaagataccgaggaacacttccgtcaggtgaatattgaccagaatcggtgccattcccgcgtcatgatgcagatagctgttaaagccaaccagcactgccgccagacccacgaagctatgcaggatcgccaccagttctggcatttcggtcatttcaactttcttcgccagacggataccaattgccccaccaatgaccatcgccagcaagatccagccaacattacccgtatccggtccaaaaatggttgcgattaacgcaatcgccatcccggcgataccgaagttgttaccctggcgagacgtttcatgtttcgaaagaccggccagactgaagataaacaggatcgcggcaacaatgtatgcagctgtaactaatcctccagacatatgttaccccttaatttttgcggaacattttcagcatgcgctgagtcacggtgaagccaccgaaaatattaatgctggctataagcaccgcgataaaactaaggaagctaacccagccgccctggccaatctgcaacagtgctccgacaacaataatccctgaaatcgcgttggtgaccgacatcaacggtgtatgcagcgcgtgcgatacattccacaccacgtaataaccgacaacgcaggccagcgcgaaaacggtgaagtgcccaaggaattctttcggcgcaacgcttgccatccagccaaaaagaatgattgccagcgccatcaacgcgtatttacgccacggtgagcaggtacatttttcctcagttttcacttccggtgccgctttttgtgccgcctgcggctgagctgatacctgaatcggcggtgccggccaggtaatttcgcccgcacggatcacggtcacgccgcgaatcaccacatcatcaaaatcaacagtgatattgccgtctttctctttgcacaacagtttcagcagattaacgaggtttgtgccgtaaagctgtgaggattgcgtcggcagacggcccggaagatcggtataaccaatcactttgacaccattttccgtagtgaagatttcacccggcacggtgtattcacagttgccgccgttttgggctgccaggtcgacaatcacactgcccgccttcatggagtcaaccatttcacgggtaattagcttcggcgctggtttgcctggaataagcgcggtggtgacaatgatatcgacctcttttgcctgggcggcaaagagttccatttccgctttgatgaacgcgtccgacatcactttggcatagccatcgccgctgccagcttcctctttaaaatccagctcgaggaattccgcgcccatactttgaacttgttctttcacttccgggcgggtgtcgaatgcacgcacaatcgcgccgagactgtttgctgcgccaatggcggccagacctgcaacacccgcaccaatcaccatcacttttgccggtggcactttcccggccgcagtaatttgcccggtaaagaagcgcccaaattcatgtgccgcttcaacaatggcgcgataaccggcgatgttcgccatcgagcttagtgcgtccagcgattgtgcgcgtgagatacgcggcacagagtccatcgccatcacggtcacgttacgttccgcaagtttttgcattaattccggattctgcgcaggccagataaaactcaccagcgttgtcccaggattcagtaacgcaatttcatcatctaacggcgcattgaccttcagaatgatctctgactgccagacgctattcccttctacaatttcagcgcccgcttgcacaaacgctttatcgtcaaaacttgccagttgacccgcgccgctctctaccgcgacggtaaaacccagtttcagcagctgttccactgtttttggcgttgctgcaacacgggtttcattggttaaccgttctcttggtatgccaattgccatggtaaatactccttgaaaagtaaagtgttagatgagtgcgttaattcacacttctgagaaatttcgctaaacgcatcaaaaaagcatagcagacaggcatggtattgctggattaagcaggtaacatcagtgttataggattattaccaaaacattatattcacaggtgtatcgctcaatactgaccatttaaatcatacctgacctccatagcagaaagtcaaaagcctccgaccggaggcttttgacttgagggggatcagcttctattatttctcttgcaggcccagtttcttttccaggtagtgaatgttcgtaccgccgtgctggaaattctcgtcgttcataatgcggatctgcaaatccacattggtcttaatgccatcaatgatcagctcttgcagcgcgtttttcatgcgggcgatcgcgacatcacgattttcgccatagcagatcagtttaccaatcatgctgtcatagtacggcggcacggtgtaaccggcgtagatgtgagactcccaacgaacgccaaaaccacctggcgcgtgaaaacgcgtgatcttaccagggctcggcagaaaggtattcgggtcctccgcattgatacggcactcgaccgcgtgaccacgaacgtgcacctcttcttgcttgatcgacagcggctgaccagccgcaatgcgcagttgctctttgatcagatcaacgccagtaatcatctcggtcaccgggtgctcaacctggatgcgggtattcatttcaatgaagtaaaactcaccattttcgaacaggaactcaaacgtacccgcaccacggtaaccaatgtccacacacgctttcgcacagcgctcaccgatgtagcgacgcagttccggcgtaatacccggagccggtgcctcttccaccaccttctgatgacggcgttgcatggagcaatcacgttctgccaagtagatcgcattgccctgaccatccgccagaacttggatttcaacgtggcgcggattctccagatacttctccatatacaccatatcgttagagaacgccgctttggcttccgcacgggtcatgctgatgctttgcgccagttccgcatcaccacggacgacacgcataccacggccaccgccaccaccagaggctttgataatgaccgggtagccaatacgtttagcgatggcacggttcttgtccatatcgtcacccagcggaccatcgctgcccggaacacacggcacaccggcctttttcatcgctgcaatggcgctcactttgtcgcccatcaggcgaatcgtctccgccttagggccaatgaagatgaaaccgctacgctccacttgttcagcaaagttagcgttctcgctcaggaaaccgtagcccggatgaatcgccactgcaccggtgatctctgccgcagagatgatggccgggatgttcagatagcttttcacgctcggtgccggaccgatgcaaaccgtttcgtcggccagcagaacatgcttcaggtcgcggtctgcgctggaatgcacggcaacagtcttaatgcccagctctttacacgcgcgcaagatacgcagcgcgatttcaccgcggtttgcaatcacgatcttgtccaacatgttcgcctcgttactcgatcacaaccagcggttcatcgaactcaacaggctggccggattccaccaggatcgctttaacagtaccgctcttatccgcttcaatctggttcatcattttcattgcctcaacgatacacagcgtgtcgccgacattgaccttctggccgacttcgatgaaggcttttgcgtccggcgacggcgtgcgatagaaggtgcccaccatcgggctacgcacgatatgacccgaaatctcggccgctgccggtgcctccatgcttggaacggtcgccggtgcagcggcgttgctctgtgccggctgttgcatcatcggagcggcgtatgcttgctgcataaccggaaagctcgctgccggtgccgcacgggaaatacggacgctctcttcaccttcgctgatctccagctcgctgatgccgctttcttcaaccagttcaatcagtttcttgatcttacgaatgtccatggtttttcctccttcgcctgtggtatgaaatttcacacgcattatatacaaaaaaagcgattcagaccccgttggcaagccgcgtggttaactccacgtgctattatgcctccggctcttggtccgggaccggcggaaccacgacaccctcacgcggtgcttcaggattcggagccggcagattcatcaatttcgccagaatgctcgccagtttcagacgcatttctggacggcgaacgatcatgtcgatggcacctttctcaatcaggaactcgctgcgctggaaaccaggcggcaacttttcgcgaaccgtctgttcaataacacgcggaccagcaaaaccaatcagagccttcggctctgcgatgttcaaatcacccagcatcgcaaagctggcgctgacaccgcccatcgtagggtcggtcaggacggaaatgtacggcaggccgcgttcttgcatcttcgccagggctgccgaggtttttgccatctgcatcaggctcatcagggcctcttgcatacgcgcaccaccgctcgcgctgaaacaaatcagaggacagttatcctccagcgcctgctccacggcacgcacaaagcgtgcgcccaccacggaacccatgctgccacccataaacgcaaactcgaacgccgcagcaacaaccggcataccatacagggtgcctttcataacaaccagtgcgtccttctcaccggtttctttttgtgcagatgccaaacgatccttatacttcttggaatcacggaatttcagaacatctttcggttccagttcgctacccagctcgaccaggctgccctcatccagcaggctatgcagacgattacgagcggtcatacgcatgtgatggtcgcatttcgggcacacttccaggttacgctccagctccgcacgatacaaaacctgaccgcagctatcgcatttggtccagacgccttcagggatgctcgccttgcgggtcggggtgatattggacttaatgcgttcaatccagctcatgattttcctcctttactacgcgtagccatagctcatcaagcgctgatagcgacggtttttcagatcctccgtgctcagcacgtccagatccgccaggtccgccagcagctgggccttcaggctggctgccatcgcctccggattacggtgagcaccgcccagcggttccgggatgatagaatcaatcaacttcagttctttcagacgcggtgcgatgatacccatcgcttccgctgccaatggtgctttatccgcgctcttccacagaatggaagcgcaaccttccgggctaatgacgctgtacgtgctgtattgcagcatgttgaccttatcaccgacaccgatcgccaacgcaccaccgctaccgccctcgccaatcacggtgcaaacgaccggcacacccagacgagacatctcacgcaggttacgtgcgatggcctcgctctgaccacgctcttccgcaccaacgcctgggtacgcacccggcgtatcaatgaacgtgataatcggcatcttaaagcgttcggccatttgcatcagacgcagggccttgcggtagccctccggtgccggcataccaaagttacgacgaatcttttctttcgtctcgcggcctttttgatggccgataatcatcaccggacggccatccaaacgagcaataccgccgacaattgctttatcgtccgcataggcgcggtcgcctgccagttcgtcgaactcgtcaaacgccaggcgcacgtagtccagggtatatgggcgttgtgggtggcgagccaactgggcaatctgccatgcgcccaaatcagcaaagattttgcgagtcagttcaacagacttctcacgcaaacggtggacctcttcgtcgatgttaatgtccagtttctcatcttgacggctaaccgcggtcaggctgtcaatcttcgcttccagttctgcaatcggctgctcgaagtccaggaagttcagggacatgtttttcctcctgccccgcgcttataagcgaataaaggaagatggccgccccgcagggcagcaggtctgtgaaacagtatagagattcatcggcacaaaggctttgctttttgtcatttattcaaaccggcgcctcgaaccggctccgggcattgccctggccggcactttgcatggggagatgcggatctcgggcagcgttgggtcctggccacgggtgcgcatgatcgtgctcctgtcgttgaggacccggctaggctggcggggttgccttactggttagcagaatgaatcaccgatacgcgagcgaacgtgaagcgactgctgctgcaaaacgtctgcgacctgagcaacaacatgaatggtcttcggtttccgtgtttcgtaaagtctggaaacgcggaagtcccctacgtgctgctgaagttgcccgcaacagagagtggaaccaaccggtgataccacgatactatgactgagagtcaacgccatgagcggcctcatttcttattctgagttacaacagtccgcaccgctgtccggtagctccttccggtgggcgcggggcatgactatcgtcgccgcacttatgactgtcttctttatcatgcaactcgtaggacaggtgccggcagcgcccaacagtcccccggccacggggcctgccaccatacccacgccgaaacaagcgccctgcaccattatgttccggatctgcatcgcaggatgctgctggctaccctgtggaacacctacatctgtattaacgaagcgctaaccgtttttatcaggctctgggaggcagaataaatgatcatatcgtcaattattacctccacggggagagcctgagcaaactggcctcaggcatttgagaagcacacggtcacactgcttccggtagtcaataaaccggtaaaccagcaatagacataagcggctatttaacgaccctgccctgaaccgacgaccgggtcgaatttgctttcgaatttctgccattcatccgcttattatcacttattcaggcgtagcaccaggcgtttaagggcaccaataactgccttaaaaaaattacgccccgccctgccactcatcgcagtactgttgtaattcattaagcattctgccgacatggaagccatcacagacggcatgatgaacctgaatcgccagcggcatcagcaccttgtcgccttgcgtataatatttgcccatggtgaaaacgggggcgaagaagttgtccatattggccacgtttaaatcaaaactggtgaaactcacccagggattggctgagacgaaaaacatattctcaataaaccctttagggaaataggccaggttttcaccgtaacacgccacatcttgcgaatatatgtgtagaaactgccggaaatcgtcgtggtattcactccagagcgatgaaaacgtttcagtttgctcatggaaaacggtgtaacaagggtgaacactatcccatatcaccagctcaccgtctttcattgccatacg

SEQ ID NO: 5 - DNA, 9047 bp, Artificial Sequence
  Description of Artificial Sequence: Synthetic pACYC-CAT-accADBC-udhA polynucleotide
gaattccggatgagcattcatcaggcgggcaagaatgtgaataaaggccggataaaacttgtgcttatttttctttacggtctttaaaaaggccgtaatatccagctgaacggtctggttataggtacattgagcaactgactgaaatgcctcaaaatgttctttacgatgccattgggatatatcaacggtggtatatccagtgatttttttctccattttagcttccttagctcctgaaaatctcgataactcaaaaaatacgcccggtagtgatcttatttcattatggtgaaagttggaacctcttacgtgccgatcaacgtctcattttcgccaaaagttggcccagggcttcccggtatcaacagggacaccaggatttatttattctgcgaagtgatcttccgtcacaggtatttattcggcgcaaagtgcgtcgggtgatgctgccaacttactgatttagtgtatgatggtgtttttgaggtgctccagtggcttctgtttctatcagctgtccctcctgttcagctactgacggggtggtgcgtaacggcaaaagcaccgccggacatcagcgctagcggagtgtatactggcttactatgttggcactgatgagggtgtcagtgaagtgcttcatgtggcaggagaaaaaaggctgcaccggtgcgtcagcagaatatgtgatacaggatatattccgcttcctcgctcactgactcgctacgctcggtcgttcgactgcggcgagcggaaatggcttacgaacggggcggagatttcctggaagatgccaggaagatacttaacagggaagtgagagggccgcggcaaagccgtttttccataggctccgcccccctgacaagcatcacgaaatctgacgctcaaatcagtggtggcgaaacccgacaggactataaagataccaggcgtttccccctggcggctccctcgtgcgctctcctgttcctgcctttcggtttaccggtgtcattccgctgttatggccgcgtttgtctcattccacgcctgacactcagttccgggtaggcagttcgctccaagctggactgtatgcacgaaccccccgttcagtccgaccgctgcgccttatccggtaactatcgtcttgagtccaacccggaaagacatgcaaaagcaccactggcagcagccactggtaattgatttagaggagttagtcttgaagtcatgcgccggttaaggctaaactgaaaggacaagttttggtgactgcgctcctccaagccagttacctcggttcaaagagttggtagctcagagaaccttcgaaaaaccgccctgcaaggcggttttttcgttttcagagcaagagattacgcgcagaccaaaacgatctcaagaagatcatcttattaatcagataaaatatttctagatttcagtgcaatttatctcttcaaatgtagcacctgaagtcagccccatacgatataagttgtaattctcatgtttgacagcttatcatcgataagctttaatgcggtagtttatcacagttaaattgctaacgcagtcaggcaccgtgtatgaaatctaacaatgcgctcatcgtcatcctcggcaccgtcaccctggatgctgtaggcataggcttggttatgccggtactgccgggcctcttgcgggatttaagctcgggccccctgggcggttctgataacgagtaatcgttaatccgcaaataacgtaaaaacccgcttcggcgggtttttttatggggggagtttagggaaagagcatttgtcagaatatttaagggcgcctgtcactttgcttgatatatgagaattatttaaccttataaatgagaaaaaagcaacgcactttaaataagatacgttgctttttcgattgatgaacacctataattaaactattcatctattatttatgattttttgtatatacaatatttctagtttgttaaagagaattaagaaaataaatctcgaaaataataaagggaaaatcagtttttgatttaaaacaggcggtttaaaccgtttaacgcagctacccgataggcttccgccatcgtcgggtagttaaaggtggtgttgacgaagtactcaatagtgttgccgccacctttctgttccataatcgcctgaccgatatgaataatttcggcagcgcgctcgccaaagcagtgaatacccagaatctcttttgtttcccgatggaacaaaattttcagcgtgcccacgttcatgccgacgatttgtgcgcgtgccagatgtttaaactgggcgcggcccacttcatatggcactttcattgcggtcagctgctgttcggttttgcccacagagctgatttccgggatggtgtaaataccggtagggatatcttcaatcagatgtgcggtggcttcgccttttaccagcgcctgcgcggcaatgcgcccctggtcataggccgccgacgccaggctcggataaccaatcacgtcgcccaccgcgtaaacgtgtggctgtgcggtctgatacatgctgttgaccttcagctgtccgcggctgtcagtttctagcccaatgttctgtaacgccagcgaatcggtattaccggtgcgaccgttggcatagagcaggcagtcagctttcagttttttacccgacttcagatgcatgatcacaccatcgtcacagccttcgatcttctcgtactcttcgttgtgacgaatcactacgccactgttccagaagtgataggagagagaatctgacatctcttgatcgagaaatgccagcaggcgatcgcgggtgttgatcagatccacttttacatccataccgcggaagatcgacgcatattcacagccgatcactccagcaccatagataagtacatggcgcggttcgtggtgcatgctgagaattgagtcgctgtcgtaaatgcgtggatgggtgaaatcaacatctgttggatgatatggacgagagccgcaggcaataacaaatttttcagcggttagtgtttcaacgctgccgtccgggcaatccagcgccaacgtatgctcgtcaacaaagcgagcgtttccctgcaatatttcacagtgattacgttcgtaaaatccctgacgcatgcgcgtttgttgattaatcacgttatcggcatggttaaggatatcggcaaaagaagagcggagcagtcgggaatggtcgctgtaaagtgggttttgattgaattctataatgcggctgacggcgtgacggagagctttcgacgggatggtgccccagtgggtgcaaccgccgccaacattttgataacgctcgataactgcgacgcgcgcaccttgcttaaccaggcccattgcagcgccttcgccgccggggccggaacctattactatggcatcgtaatcgtaggaatgtggggccatggtaaatactccttgaaaagtaaagtgttagatgagtgcgttaattcacacttctgagaaatttcgctaaacgcatcaaaaaagcatagcagacaggcatggtattgctggattaagcaggtaacatcagtgttataggattattaccaaaacattatattcacaggtgtatcgctcaatactgaccatttaaatcatacctgacctccatagcagaaagtcaaaagcctccgaccggaggcttttgacttgagggggatcagcttctattatttctcttgcaggcccagtttcttttccaggtagtgaatgttcgtaccgccgtgctggaaattctcgtcgttcataatgcggatctgcaaatccacattggtcttaatgccatcaatgatcagctcttgcagcgcgtttttcatgcgggcgatcgcgacatcacgattttcgccatagcagatcagtttaccaatcatgctgtcatagtacggcggcacggtgtaaccggcgtagatgtgagactcccaacgaacgccaaaaccacctggcgcgtgaaaacgcgtgatcttaccagggctcggcagaaaggtattcgggtcctccgcattgatacggcactcgaccgcgtgaccacgaacgtgcacctcttcttgcttgatcgacagcggctgaccagccgcaatgcgcagttgctctttgatcagatcaacgccagtaatcatctcggtcaccgggtgctcaacctggatgcgggtattcatttcaatgaagtaaaactcaccattttcgaacaggaactcaaacgtacccgcaccacggtaaccaatgtccacacacgctttcgcacagcgctcaccgatgtagcgacgcagttccggcgtaatacccggagccggtgcctcttccaccaccttctgatgacggcgttgcatggagcaatcacgttctgccaagtagatcgcattgccctgaccatccgccagaacttggatttcaacgtggcgcggattctccagatacttctccatatacaccatatcgttagagaacgccgctttggcttccgcacgggtcatgctgatgctttgcgccagttccgcatcaccacggacgacacgcataccacggccaccgccaccaccagaggctttgataatgaccgggtagccaatacgtttagcgatggcacggttcttgtccatatcgtcacccagcggaccatcgctgcccggaacacacggcacaccggcctttttcatcgctgcaatggcgctcactttgtcgcccatcaggcgaatcgtctccgccttagggccaatgaagatgaaaccgctacgctccacttgttcagcaaagttagcgttctcgctcaggaaaccgtagcccggatgaatcgccactgcaccggtgatctctgccgcagagatgatggccgggatgttcagatagcttttcacgctcggtgccggaccgatgcaaaccgtttcgtcggccagcagaacatgcttcaggtcgcggtctgcgctggaatgcacggcaacagtcttaatgcccagctctttacacgcgcgcaagatacgcagcgcgatttcaccgcggtttgcaatcacgatcttgtccaacatgttcgcctcgttactcgatcacaaccagcggttcatcgaactcaacaggctggccggattccaccaggatcgctttaacagtaccgctcttatccgcttcaatctggttcatcattttcattgcctcaacgatacacagcgtgtcgccgacattgaccttctggccgacttcgatgaaggcttttgcgtccggcgacggcgtgcgatagaaggtgcccaccatcgggctacgcacgatatgacccgaaatctcggccgctgccggtgcctccatgcttggaacggtcgccggtgcagcggcgttgctctgtgccggctgttgcatcatcggagcggcgtatgcttgctgcataaccggaaagctcgctgccggtgccgcacgggaaatacggacgctctcttcaccttcgctgatctccagctcgctgatgccgctttcttcaaccagttcaatcagtttcttgatcttacgaatgtccatggtttttcctccttcgcctgtggtatgaaatttcacacgcattatatacaaaaaaagcgattcagaccccgttggcaagccgcgtggttaactccacgtgctattatgcctccggctcttggtccgggaccggcggaaccacgacaccctcacgcggtgcttcaggattcggagccggcagattcatcaatttcgccagaatgctcgccagtttcagacgcatttctggacggcgaacgatcatgtcgatggcacctttctcaatcaggaactcgctgcgctggaaaccaggcggcaacttttcgcgaaccgtctgttcaataacacgcggaccagcaaaaccaatcagagccttcggctctgcgatgttcaaatcacccagcatcgcaaagctggcgctgacaccgcccatcgtagggtcggtcaggacggaaatgtacggcaggccgcgttcttgcatcttcgccagggctgccgaggtttttgccatctgcatcaggctcatcagggcctcttgcatacgcgcaccaccgctcgcgctgaaacaaatcagaggacagttatcctccagcgcctgctccacggcacgcacaaagcgtgcgcccaccacggaacccatgctgccacccataaacgcaaactcgaacgccgcagcaacaaccggcataccatacagggtgcctttcataacaaccagtgcgtccttctcaccggtttctttttgtgcagatgccaaacgatccttatacttcttggaatcacggaatttcagaacatctttcggttccagttcgctacccagctcgaccaggctgccctcatccagcaggctatgcagacgattacgagcggtcatacgcatgtgatggtcgcatttcgggcacacttccaggttacgctccagctccgcacgatacaaaacctgaccgcagctatcgcatttggtccagacgccttcagggatgctcgccttgcgggtcggggtgatattggacttaatgcgttcaatccagctcatgattttcctcctttactacgcgtagccatagctcatcaagcgctgatagcgacggtttttcagatcctccgtgctcagcacgtccagatccgccaggtccgccagcagctgggccttcaggctggctgccatcgcctccggattacggtgagcaccgcccagcggttccgggatgatagaatcaatcaacttcagttctttcagacgcggtgcgatgatacccatcgcttccgctgccaatggtgctttatccgcgctcttccacagaatggaagcgcaaccttccgggctaatgacgctgtacgtgctgtattgcagcatgttgaccttatcaccgacaccgatcgccaacgcaccaccgctaccgccctcgccaatcacggtgcaaacgaccggcacacccagacgagacatctcacgcaggttacgtgcgatggcctcgctctgaccacgctcttccgcaccaacgcctgggtacgcacccggcgtatcaatgaacgtgataatcggcatcttaaagcgttcggccatttgcatcagacgcagggccttgcggtagccctccggtgccggcataccaaagttacgacgaatcttttctttcgtctcgcggcctttttgatggccgataatcatcaccggacggccatccaaacgagcaataccgccgacaattgctttatcgtccgcataggcgcggtcgcctgccagttcgtcgaactcgtcaaacgccaggcgcacgtagtccagggtatatgggcgttgtgggtggcgagccaactgggcaatctgccatgcgcccaaatcagcaaagattttgcgagtcagttcaacagacttctcacgcaaacggtggacctcttcgtcgatgttaatgtccagtttctcatcttgacggctaaccgcggtcaggctgtcaatcttcgcttccagttctgcaatcggctgctcgaagtccaggaagttcagggacatgtttttcctcctgccccgcgcttataagcgaataaaggaagatggccgccccgcagggcagcaggtctgtgaaacagtatagagattcatcggcacaaaggctttgctttttgtcatttattcaaaccggcgcctcgaaccggctccgggcattgccctggccggcactttgcatggggagatgcggatctcgggcagcgttgggtcctggccacgggtgcgcatgatcgtgctcctgtcgttgaggacccggctaggctggcggggttgccttactggttagcagaatgaatcaccgatacgcgagcgaacgtgaagcgactgctgctgcaaaacgtctgcgacctgagcaacaacatgaatggtcttcggtttccgtgtttcgtaaagtctggaaacgcggaagtcccctacgtgctgctgaagttgcccgcaacagagagtggaaccaaccggtgataccacgatactatgactgagagtcaacgccatgagcggcctcatttcttattctgagttacaacagtccgcaccgctgtccggtagctccttccggtgggcgcggggcatgactatcgtcgccgcacttatgactgtcttctttatcatgcaactcgtaggacaggtgccggcagcgcccaacagtcccccggccacggggcctgccaccatacccacgccgaaacaagcgccctgcaccattatgttccggatctgcatcgcaggatgctgctggctaccctgtggaacacctacatctgtattaacgaagcgctaaccgtttttatcaggctctgggaggcagaataaatgatcatatcgtcaattattacctccacggggagagcctgagcaaactggcctcaggcatttgagaagcacacggtcacactgcttccggtagtcaataaaccggtaaaccagcaatagacataagcggctatttaacgaccctgccctgaaccgacgaccgggtcgaatttgctttcgaatttctgccattcatccgcttattatcacttattcaggcgtagcaccaggcgtttaagggcaccaataactgccttaaaaaaattacgccccgccctgccactcatcgcagtactgttgtaattcattaagcattctgccgacatggaagccatcacagacggcatgatgaacctgaatcgccagcggcatcagcaccttgtcgccttgcgtataatatttgcccatggtgaaaacgggggcgaagaagttgtccatattggccacgtttaaatcaaaactggtgaaactcacccagggattggctgagacgaaaaacatattctcaataaaccctttagggaaataggccaggttttcaccgtaacacgccacatcttgcgaatatatgtgtagaaactgccggaaatcgtcgtggtattcactccagagcgatgaaaacgtttcagtttgctcatggaaaacggtgtaacaagggtgaacactatcccatatcaccagctcaccgtctttcattgccatacg

SEQ ID NO: 6 - DNA, 5592 bp, Artificial Sequence
  Description of Artificial Sequence: Synthetic pBT-3-PtiA:pntAB plasmid polynucleotide
aacgaattcaagcttgatatccactgtggaattcgcccttttacagagctttcaggattgcatccacgctggctttggcgtcaccaaacagcatgtgggtgttttccttgaagaacagcgggttttgcacaccagcatagccagtgttcatcgaacgtttaaagacaatcacgttctgcgctttccacacttccagcacaggcataccagcaatcggactcttcggatcatcctgcgccgccgggttaaccgtatcgttagcaccaatcaccagtacggtatcggtatcagcaaagtcatcattgatctcgtccatttccagcacgatgtcatacggtacttttgcttcagccagcaatacgttcatatgtccaggcaaacgccccgcgaccgggtggataccgaaacgcacattaataccacgagcgcgcaatttctcagtaatttcagcgacaggatattgcgcctgcgcgactgccatgccgtaccccggagtaatgatcactgaatgggagtttttcagcagttccgctgtctcttctgcggtgatttcgcggtgctcacccacttcctgatcatcgccagtagaagagccgtcggtgccgaaaccacccgcaataacgctgataaaggaacggttcatcgccttacacataatgtaagaaaggatagcccccgaagaaccgaccagcgcaccggtcacaatcagcaggtcgttgctgagcataaagcccgcagccgcagccgcccagccggagtacgagttcagcatcgacaccaccactggcatatctgcaccaccgatggaggcgactaaatgccagccgaataccagcgcaattgcggtcattatcagcaatgccagcacttgcaggccgacgctgtccgtgcgaacaaatacaatcagcagcaggaaggaaacgaccagagccgccaggttcattttgtgacggtttggcagcatcaatggtttagacgaaatcttgccacacagtttgccgaacgccaccaccgaacccgtgaacgttaccgccccgatgaagataccgaggaacacttccgtcaggtgaatattgaccagaatcggtgccattcccgcgtcatgatgcagatagctgttaaagccaaccagcactgccgccagacccacgaagctatgcaggatcgccaccagttctggcatttcggtcatttcaactttcttcgccagacggataccaattgccccaccaatgaccatcgccagcaagatccagccaacattacccgtatccggtccaaaaatggttgcgattaacgcaatcgccatcccggcgataccgaagttgttaccctggcgagacgtttcatgtttcgaaagaccggccagactgaagataaacaggatcgcggcaacaatgtatgcagctgtaactaatcctccagacatatgttaccccttaatttttgcggaacattttcagcatgcgctgagtcacggtgaagccaccgaaaatattaatgctggctataagcaccgcgataaaactaaggaagctaacccagccgccctggccaatctgcaacagtgctccgacaacaataatccctgaaatcgcgttggtgaccgacatcaacggtgtatgcagcgcgtgcgatacattccacaccacgtaataaccgacaacgcaggccagcgcgaaaacggtgaagtgcccaaggaattctttcggcgcaacgcttgccatccagccaaaaagaatgattgccagcgccatcaacgcgtatttacgccacggtgagcaggtacatttttcctcagttttcacttccggtgccgctttttgtgccgcctgcggctgagctgatacctgaatcggcggtgccggccaggtaatttcgcccgcacggatcacggtcacgccgcgaatcaccacatcatcaaaatcaacagtgatattgccgtctttctctttgcacaacagtttcagcagattaacgaggtttgtgccgtaaagctgtgaggattgcgtcggcagacggcccggaagatcggtataaccaatcactttgacaccattttccgtagtgaagatttcacccggcacggtgtattcacagttgccgccgttttgggctgccaggtcgacaatcacactgcccgccttcatggagtcaaccatttcacgggtaattagcttcggcgctggtttgcctggaataagcgcggtggtgacaatgatatcgacctcttttgcctgggcggcaaagagttccatttccgctttgatgaacgcgtccgacatcactttggcatagccatcgccgctgccagcttcctctttaaaatccagctcgaggaattccgcgcccatactttgaacttgttctttcacttccgggcgggtgtcgaatgcacgcacaatcgcgccgagactgtttgctgcgccaatggcggccagacctgcaacacccgcaccaatcaccatcacttttgccggtggcactttcccggccgcagtaatttgcccggtaaagaagcgcccaaattcatgtgccgcttcaacaatggcgcgataaccggcgatgttcgccatcgagcttagtgcgtccagcgattgtgcgcgtgagatacgcggcacagagtccatcgccatcacggtcacgttacgttccgcaagtttttgcattaattccggattctgcgcaggccagataaaactcaccagcgttgtcccaggattcagtaacgcaatttcatcatctaacggcgcattgaccttcagaatgatctctgactgccagacgctattcccttctacaatttcagcgcccgcttgcacaaacgctttatcgtcaaaacttgccagttgacccgcgccgctctctaccgcgacggtaaaacccagtttcagcagctgttccactgtttttggcgttgctgcaacacgggtttcattggttaaccgttctcttggtatgccaattcgcattttaattctccacgcttataagcgaataaaggaagatggccgccccgcagggcagcaggtctgtgaaacagtatagagattcatcggcacaaaggctttgctttttgtcatttattcaaaccaagggcgaattccacattggtcgctgcagcccgggggatccactagttctagagcggccgcaccgcgggagctagagaattcgtcaacgaattcaacgaattcaagcttgatatcattcaggacgagcctcagactccagcgtaactggactgaaaacaaactaaagcgcccttgtggcgctttagttttgttccgcggccaccggctggctcgcttcgctcggcccgtggacaaccctgctggacaagctgatggacaggctgcgcctgcccacgagcttgaccacagggattgcccaccggctacccagccttcgaccacatacccaccggctccaactgcgcggcctgcggccttgccccatcaatttttttaattttctctggggaaaagcctccggcctgcggcctgcgcgcttcgcttgccggttggacaccaagtggaaggcgggtcaaggctcgcgcagcgaccgcgcagcggcttggccttgacgcgcctggaacgacccaagcctatgcgagtgggggcagtcgaaggcgaagcccgcccgcctgccccccgagcctcacggcggcgagtgcgggggttccaagggggcagcgccaccttgggcaaggccgaaggccgcgcagtcgatcaacaagccccggaggggccactttttgccggagggggagccgcgccgaaggcgtgggggaaccccgcaggggtgcccttctttgggcaccaaagaactagatatagggcgaaatgcgaaagacttaaaaatcaacaacttaaaaaaggggggtacgcaacagctcattgcggcaccccccgcaatagctcattgcgtaggttaaagaaaatctgtaattgactgccacttttacgcaacgcataattgttgtcgcgctgccgaaaagttgcagctgattgcgcatggtgccgcaaccgtgcggcaccctaccgcatggagataagcatggccacgcagtccagagaaatcggcattcaagccaagaacaagcccggtcactgggtgcaaacggaacgcaaagcgcatgaggcgtgggccgggcttattgcgaggaaacccacggcggcaatgctgctgcatcacctcgtggcgcagatgggccaccagaacgccgtggtggtcagccagaagacactttccaagctcatcggacgttctttgcggacggtccaatacgcagtcaaggacttggtggccgagcgctggatctccgtcgtgaagctcaacggccccggcaccgtgtcggcctacgtggtcaatgaccgcgtggcgtggggccagccccgcgaccagttgcgcctgtcggtgttcagtgccgccgtggtggttgatcacgacgaccaggacgaatcgctgttggggcatggcgacctgcgccgcatcccgaccctgtatccgggcgagcagcaactaccgaccggccccggcgaggagccgcccagccagcccggcattccgggcatggaaccagacctgccagccttgaccgaaacggaggaatgggaacggcgcgggcagcagcgcctgccgatgcccgatgagccgtgttttctggacgatggcgagccgttggagccgccgacacgggtcacgctgccgcgccggtagtacgtaagaggttccaactttcaccataatgaaataagatcactaccgggcgtattttttgagttatcgagattttcaggagctaaggaagctaaaatggagaaaaaaatcactggatataccaccgttgatatatcccaatggcatcgtaaagaacattttgaggcatttcagtcagttgctcaatgtacctataaccagaccgttcagctggatattacggcctttttaaagaccgtaaagaaaaataagcacaagttttatccggcctttattcacattcttgcccgcctgatgaatgctcatccggaattccgtatggcaatgaaagacggtgagctggtgatatgggatagtgttcacccttgttacaccgttttccatgagcaaactgaaacgttttcatcgctctggagtgaataccacgacgatttccggcagtttctacacatatattcgcaagatgtggcgtgttacggtgaaaacctggcctatttccctaaagggtttattgagaatatgtttttcgtctcagccaatccctgggtgagtttcaccagttttgatttaaacgtggccaatatggacaacttcttcgcccccgttttcaccatgggcaaatattatacgcaaggcgacaaggtgctgatgccgctggcgattcaggttcatcatgccgtttgtgatggcttccatgtcggcagaatgcttaatgaattacaacagtactgcgatgagtggcagggcggggcgtaaacgcgtggatccccctcaagtcaaaagcctccggtcggaggcttttgactttctgctatggaggtcaggtatgatttaaatggtcagtattgagcgatatctagagaattcgtc

SEQ ID NO: 7 - protein, 309 aa, Escherichia coli [sequence omitted]

SEQ ID NO: 8 - protein, 413 aa, Escherichia coli
  3-oxoacyl-[acyl-carrier-protein] synthase II [Escherichia coli str. K-12 substr. MG1655]
MSKRRVVVTGLGMLSPVGNTVESTWKALLAGQSGISLIDHFDTSAYATKFAGLVKDFNCEDIISRKEQRKMDAFIQYGIVAGVQAMQDSGLEITEENATRIGAAIGSGIGGLGLIEENHTSLMNGGPRKISPFFVPSTIVNMVAGHLTIMYGLRGPSISIATACTSGVHNIGHAARIIAYGDADVMVAGGAEKASTPLGVGGFGAARALSTRNDNPQAASRPWDKERDGFVLGDGAGMLVLEEYEHAKKRGAKIYAELVGFGMSSDAYHMTSPPENGAGAALAMANALRDAGIEASQIGYVNAHGTSTPAGDKAEAQAVKTIFGEAASRVLVSSTKSMTGHLLGAAGAVESIYSILALRDQAVPPTINLDNPDEGCDLDFVPHEARQVSGMEYTLCNSFGFGGTNGSLIFKKI

SEQ ID NO: 9 - protein, 406 aa, Escherichia coli
  3-oxoacyl-[acyl-carrier-protein] synthase I [Escherichia coli str. K-12 substr. MG1655]
MKRAVITGLGIVSSIGNNQQEVLASLREGRSGITFSQELKDSGMRSHVWGNVKLDTTGLIDRKVVRFMSDASIYAFLSMEQAIADAGLSPEAYQNNPRVGLIAGSGGGSPRFQVFGADAMRGPRGLKAVGPYVVTKAMASGVSACLATPFKIHGVNYSISSACATSAHCIGNAVEQIQLGKQDIVFAGGGEELCWEMACEFDAMGALSTKYNDTPEKASRTYDAHRDGFVIAGGGGMVVVEELEHALARGAHIYAEIVGYGATSDGADMVAPSGEGAVRCMKMAMHGVDTPIDYLNSHGTSTPVGDVKELAAIREVFGDKSPAISATKAMTGHSLGAAGVQEAIYSLLMLEHGFIAPSINIEELDEQAAGLNIVTETTDRELTTVMSNSFGFGGTNATLVMRKLKD

SEQ ID NO: 10 - protein, 317 aa, Escherichia coli
  FABH-MONOMER FabH 1147982..1148935 Escherichia coli K-12 substr. MG1655
MYTKIIGTGSYLPEQVRTNADLEKMVDTSDEWIVTRTGIRERHIAAPNETVSTMGFEAATRAIEMAGIEKDQIGLIVVATTSATHAFPSAACQIQSMLGIKGCPAFDVAAACAGFTYALSVADQYVKSGAVKYALVVGSDVLARTCDPTDRGTIIIFGDGAGAAVLAASEEPGIISTHLHADGSYGELLTLPNADRVNPENSIHLTMAGNEVFKVAVTELAHIVDETLAANNLDRSQLDWLVPHQANLRIISATAKKLGMSMDNVVVTLDRHGNTSAASVPCALDEAVRDGRIKPGQLVLLEAFGGGFTWGSALVRF

SEQ ID NO: 11 - protein, 244 aa, Escherichia coli
  3-oxoacyl-[acyl-carrier-protein] reductase [Escherichia coli str. K-12 substr. MG1655]
MNFEGKIALVTGASRGIGRAIAETLAARGAKVIGTATSENGAQAISDYLGANGKGLMLNVTDPASIESVLEKIRAEFGEVDILVNNAGITRDNLLMRMKDEEWNDIIETNLSSVFRLSKAVMRAMMKKRHGRIITIGSVVGTMGNGGQANYAAAKAGLIGFSKSLAREVASRGITVNVVAPGFIETDMTRALSDDQRAGILAQVPAGRLGGAQEIANAVAFLASDEAAYITGETLHVNGGMYMV

SEQ ID NO: 12 - protein, 151 aa, Escherichia coli
  (3R)-hydroxymyristol acyl carrier protein dehydratase [Escherichia coli str. K-12 substr. MG1655
MTTNTHTLQIEEILELLPHRFPFLLVDRVLDFEEGRFLRAVKNVSVNEPFFQGHFPGKPIFPGVLILEAMAQATGILAFKSVGKLEPGELYYFAGIDEARFKRPVVPGDQMIMEVTFEKTRRGLTRFKGVALVDGKVVCEATMMCARSREA

SEQ ID NO: 13 - protein, 172 aa, Escherichia coli
  beta-hydroxydecanoyl thioester dehydrase [Escherichia coli str. K-12 substr. MG1655]
MVDKRESYTKEDLLASGRGELFGAKGPQLPAPNMLMMDRVVKMTETGGNFDKGYVEAELDINPDLWFFGCHFIGDPVMPGCLGLDAMWQLVGFYLGWLGGEGKGRALGVGEVKFTGQVLPTAKKVTYRIHFKRIVNRRLIMGLADGEVLVDGRLIYTASDLKVGLFQDTSAF

SEQ ID NO: 14 - protein, 262 aa, Escherichia coli
  enoyl-[acyl-carrier-protein] reductase, NADH-dependent [Escherichia coli str. K-12 substr. MG1655]
MGFLSGKRILVTGVASKLSIAYGIAQAMHREGAELAFTYQNDKLKGRVEEFAAQLGSDIVLQCDVAEDASIDTMFAELGKVWPKFDGFVHSIGFAPGDQLDGDYVNAVTREGFKIAHDISSYSFVAMAKACRSMLNPGSALLTLSYLGAERAIPNYNVMGLAKASLEANVRYMANAMGPEGVRVNAISAGPIRTLAASGIKDFRKMLAHCEAVTPIRRTVTIEDVGNSAAFLCSDLSAGISGEVVHVDGGFSIAAMNELELK

SEQ ID NO: 15 - protein, 1220 aa, Chloroflexus aurantiacus
MSGTGRLAGKIALITGGAGNIGSELTRRFLAEGATVIISGRNRAKLTALAERMQAEAGVPAKRIDLEVMDGSDPVAVRAGIEAIVARHGQIDILVNNAGSAGAQRRLAEIPLTEAELGPGAEETLHASIANLLGMGWHLMRIAAPHMPVGSAVINVSTIFSRAEYYGRIPYVTPKAALNALSQLAARELGARGIRVNTIFPGPIESDRIRTVFQRMDQLKGRPEGDTAHHFLNTMRLCRANDQGALERRFPSVGDVADAAVFLASAESAALSGETIEVTHGMELPACSETSLLARTDLRTIDASGRTTLICAGDQIEEVMALTGMLRTCGSEVIIGFRSAAALAQFEQAVNESRRLAGADFTPPIALPLDPRDPATIDAVFDWGAGENTGGIHAAVILPATSHEPAPCVIEVDDERVLNFLADEITGTIVIASRLARYWQSQRLTPGARARGPRVIFLSNGADQNGNVYGRIQSAAIGQLIRVWRHEAELDYQRASAAGDHVLPPVWANQIVRFANRSLEGLEFACAWTAQLLHSQRHINEITLNIPANISATTGARSASVGWAESLIGLHLGKVALITGGSAGIGGQIGRLLALSGARVMLAARDRHKLEQMQAMIQSELAEVGYTDVEDRVHIAPGCDVSSEAQLADLVERTLSAFGTVDYLINNAGIAGVEEMVIDMPVEGWRHTLFANLISNYSLMRKLAPLMKKQGSGYILNVSSYFGGEKDAAIPYPNRADYAVSKAGQRAMAEVFARFLGPEIQINAIAPGPVEGDRLRGTGERPGLFARRARLILENKRLNELHAALIAAARTDERSMHELVELLLPNDVAALEQNPAAPTALRELARRFRSEGDPAASSSSALLNRSIAAKLLARLHNGGYVLPADIFANLPNPPDPFFTRAQIDREARKVRDGIMGMLYLQRMPTEFDVAMATVYYLADRNVSGETFHPSGGLRYERTPTGGELFGLPSPERLAELVGSTVYLIGEHLTEHLNLLARAYLERYGARQVVMIVETETGAETMRRLLHDHVEAGRLMTIVAGDQIEAAIDQAITRYGRPGPVVCTPFRPLPTVPLVGRKDSDWSTVLSEAEFAELCEHQLTHHFRVARKIALSDGASLALVTPETTATSTTEQFALANFIKTTLHAFTATIGVESERTAQRILINQVDLTRRARAEEPRDPHERQQELERFIEAVLLVTAPLPPEADTRYAGRIHRGRAITV

SEQ ID NO: 16 - DNA, 8252 bp, Artificial Sequence
  Description of Artificial Sequence: Synthetic polynucleotide
gaattccgctagcaggagctaaggaagctaaaatgtccggtacgggtcgtttggctggtaaaattgcattgatcaccggtggtgctggtaacattggttccgagctgacccgccgttttctggccgagggtgcgacggttattatcagcggccgtaaccgtgcgaagctgaccgcgctggccgagcgcatgcaagccgaggccggcgtgccggccaagcgcattgatttggaggtgatggatggttccgaccctgtggctgtccgtgccggtatcgaggcaatcgtcgctcgccacggtcagattgacattctggttaacaacgcgggctccgccggtgcccaacgtcgcttggcggaaattccgctgacggaggcagaattgggtccgggtgcggaggagactttgcacgcttcgatcgcgaatctgttgggcatgggttggcacctgatgcgtattgcggctccgcacatgccagttggctccgcagttatcaacgtttcgactattttctcgcgcgcagagtactatggtcgcattccgtacgttaccccgaaggcagcgctgaacgctttgtcccagctggctgcccgcgagctgggcgctcgtggcatccgcgttaacactattttcccaggtcctattgagtccgaccgcatccgtaccgtgtttcaacgtatggatcaactgaagggtcgcccggagggcgacaccgcccatcactttttgaacaccatgcgcctgtgccgcgcaaacgaccaaggcgctttggaacgccgctttccgtccgttggcgatgttgctgatgcggctgtgtttctggcttctgctgagagcgcggcactgtcgggtgagacgattgaggtcacccacggtatggaactgccggcgtgtagcgaaacctccttgttggcgcgtaccgatctgcgtaccatcgacgcgagcggtcgcactaccctgatttgcgctggcgatcaaattgaagaagttatggccctgacgggcatgctgcgtacgtgcggtagcgaagtgattatcggcttccgttctgcggctgccctggcgcaatttgagcaggcagtgaatgaatctcgccgtctggcaggtgcggatttcaccccgccgatcgctttgccgttggacccacgtgacccggccaccattgatgcggttttcgattggggcgcaggcgagaatacgggtggcatccatgcggcggtcattctgccggcaacctcccacgaaccggctccgtgcgtgattgaagtcgatgacgaacgcgtcctgaatttcctggccgatgaaattaccggcaccatcgttattgcgagccgtttggcgcgctattggcaatcccaacgcctgaccccgggtgcccgtgcccgcggtccgcgtgttatctttctgagcaacggtgccgatcaaaatggtaatgtttacggtcgtattcaatctgcggcgatcggtcaattgattcgcgtttggcgtcacgaggcggagttggactatcaacgtgcatccgccgcaggcgatcacgttctgccgccggtttgggcgaaccagattgtccgtttcgctaaccgctccctggaaggtctggagttcgcgtgcgcgtggaccgcacagctgctgcacagccaacgtcatattaacgaaattacgctgaacattccagccaatattagcgcgaccacgggcgcacgttccgccagcgtcggctgggccgagtccttgattggtctgcacctgggcaaggtggctctgattaccggtggttcggcgggcatcggtggtcaaatcggtcgtctgctggccttgtctggcgcgcgtgtgatgctggccgctcgcgatcgccataaattggaacagatgcaagccatgattcaaagcgaattggcggaggttggttataccgatgtggaggaccgtgtgcacatcgctccgggttgcgatgtgagcagcgaggcgcagctggcagatctggtggaacgtacgctgtccgcattcggtaccgtggattatttgattaataacgccggtattgcgggcgtggaggagatggtgatcgacatgccggtggaaggctggcgtcacaccctgtttgccaacctgatttcgaattattcgctgatgcgcaagttggcgccgctgatgaagaagcaaggtagcggttacatcctgaacgtttcttcctattttggcggtgagaaggacgcggcgattccttatccgaaccgcgccgactacgccgtctccaaggctggccaacgcgcgatggcggaagtgttcgctcgtttcctgggtccagagattcagatcaatgctattgccccaggtccggttgaaggcgaccgcctgcgtggtaccggtgagcgtccgggcctgtttgctcgtcgcgcccgtctgatcttggagaataaacgcctgaacgaattgcacgcggctttgattgctgcggcccgcaccgatgagcgctcgatgcacgagttggttgaattgttgctgccgaacgacgtggccgcgttggagcagaacccagcggcccctaccgcgctgcgtgagctggcacgccgcttccgtagcgaaggtgatccggcggcaagctcctcgtccgccttgctgaatcgctccatcgctgccaagctgttggctcgcttgcataacggtggctatgtgctgccggcggatatttttgcaaatctgcctaatccgccggacccgttctttacccgtgcgcaaattgaccgcgaagctcgcaaggtgcgtgatggtattatgggtatgctgtatctgcagcgtatgccaaccgagtttgacgtcgctatggcaaccgtgtactatctggccgatcgtaacgtgagcggcgaaactttccatccgtctggtggtttgcgctacgagcgtaccccgaccggtggcgagctgttcggcctgccatcgccggaacgtctggcggagctggttggtagcacggtgtacctgatcggtgaacacctgaccgagcacctgaacctgctggctcgtgcctatttggagcgctacggtgcccgtcaagtggtgatgattgttgagacggaaaccggtgcggaaaccatgcgtcgtctgttgcatgatcacgtcgaggcaggtcgcctgatgactattgtggcaggtgatcagattgaggcagcgattgaccaagcgatcacgcgctatggccgtccgggtccggtggtgtgcactccattccgtccactgccaaccgttccgctggtcggtcgtaaagactccgattggagcaccgttttgagcgaggcggaatttgcggaactgtgtgagcatcagctgacccaccatttccgtgttgctcgtaagatcgccttgtcggatggcgcgtcgctggcgttggttaccccggaaacgactgcgactagcaccacggagcaatttgctctggcgaacttcatcaagaccaccctgcacgcgttcaccgcgaccatcggtgttgagtcggagcgcaccgcgcaacgtattctgattaaccaggttgatctgacgcgccgcgcccgtgcggaagagccgcgtgacccgcacgagcgtcagcaggaattggaacgcttcattgaagccgttctgctggttaccgctccgctgcctcctgaggcagacacgcgctacgcaggccgtattcaccgcggtcgtgcgattaccgtctaatagaagcttggctgttttggcggatgagagaagattttcagcctgatacagattaaatcagaacgcagaagcggtctgataaaacagaatttgcctggcggcagtagcgcggtggtcccacctgaccccatgccgaactcagaagtgaaacgccgtagcgccgatggtagtgtggggtctccccatgcgagagtagggaactgccaggcatcaaataaaacgaaaggctcagtcgaaagactgggcctttcgttttatctgttgtttgtcggtgaacgctctcctgagtaggacaaatccgccgggagcggatttgaacgttgcgaagcaacggcccggagggtggcgggcaggacgcccgccataaactgccaggcatcaaattaagcagaaggccatcctgacggatggcctttttgcgtttctacaaactcttttgtttatttttctaaatacattcaaatatgtatccgctcatgagacaataaccctgataaatgcttcaataatattgaaaaaggaagagtatgagtattcaacatttccgtgtcgcccttattcccttttttgcggcattttgccttcctgtttttgctcacccagaaacgctggtgaaagtaaaagatgctgaagatcagttgggtgcacgagtgggttacatcgaactggatctcaacagcggtaagatccttgagagttttcgccccgaagaacgttttccaatgatgagcacttttaaagttctgctatgtggcgcggtattatcccgtgttgacgccgggcaagagcaactcggtcgccgcatacactattctcagaatgacttggttgagtactcaccagtcacagaaaagcatcttacggatggcatgacagtaagagaattatgcagtgctgccataaccatgagtgataacactgcggccaacttacttctgacaacgatcggaggaccgaaggagctaaccgcttttttgcacaacatgggggatcatgtaactcgccttgatcgttgggaaccggagctgaatgaagccataccaaacgacgagcgtgacaccacgatgctgtagcaatggcaacaacgttgcgcaaactattaactggcgaactacttactctagcttcccggcaacaattaatagactggatggaggcggataaagttgcaggaccacttctgcgctcggcccttccggctggctggtttattgctgataaatctggagccggtgagcgtgggtctcgcggtatcattgcagcactggggccagatggtaagccctcccgtatcgtagttatctacacgacggggagtcaggcaactatggatgaacgaaatagacagatcgctgagataggtgcctcactgattaagcattggtaactgtcagaccaagtttactcatatatactttagattgatttaaaacttcatttttaatttaaaaggatctaggtgaagatcctttttgataatctcatgaccaaaatcccttaacgtgagttttcgttccactgagcgtcagaccccgtagaaaagatcaaaggatcttcttgagatcctttttttctgcgcgtaatctgctgcttgcaaacaaaaaaaccaccgctaccagcggtggtttgtttgccggatcaagagctaccaactctttttccgaaggtaactggcttcagcagagcgcagataccaaatactgtccttctagtgtagccgtagttaggccaccacttcaagaactctgtagcaccgcctacatacctcgctctgctaatcctgttaccagtggctgctgccagtggcgataagtcgtgtcttaccgggttggactcaagacgatagttaccggataaggcgcagcggtcgggctgaacggggggttcgtgcacacagcccagcttggagcgaacgacctacaccgaactgagatacctacagcgtgagcattgagaaagcgccacgcttcccgaagggagaaaggcggacaggtatccggtaagcggcagggtcggaacaggagagcgcacgagggagcttccagggggaaacgcctggtatctttatagtcctgtcgggtttcgccacctctgacttgagcgtcgatttttgtgatgctcgtcaggggggcggagcctatggaaaaacgccagcaacgcggcctttttacggttcctggccttttgctggccttttgctcacatgttctttcctgcgttatcccctgattctgtggataaccgtattaccgcctttgagtgagctgataccgctcgccgcagccgaacgaccgagcgcagcgagtcagtgagcgaggaagcggaagagcgcctgatgcggtattttctccttacgcatctgtgcggtatttcacaccgcatatggtgcactctcagtacaatctgctctgatgccgcatagttaagccagtatacactccgctatcgctacgtgactgggtcatggctgcgccccgacacccgccaacacccgctgacgcgccctgacgggcttgtctgctcccggcatccgcttacagacaagctgtgaccgtctccgggagctgcatgtgtcagaggttttcaccgtcatcaccgaaacgcgcgaggcagctgcggtaaagctcatcagcgtggtcgtgaagcgattcacagatgtctgcctgttcatccgcgtccagctcgttgagtttctccagaagcgttaatgtctggcttctgataaagcgggccatgttaagggcggttttttcctgtttggtcactgatgcctccgtgtaagggggatttctgttcatgggggtaatgataccgatgaaacgagagaggatgctcacgatacgggttactgatgatgaacatgcccggttactggaacgttgtgagggtaaacaactggcggtatggatgcggcgggaccagagaaaaatcactcagggtcaatgccagcgcttcgttaatacagatgtaggtgttccacagggtagccagcagcatcctgcgatgcagatccggaacataatggtgcagggcgctgacttccgcgtttccagactttacgaaacacggaaaccgaagaccattcatgttgttgctcaggtcgcagacgttttgcagcagcagtcgcttcacgttcgctcgcgtatcggtgattcattctgctaaccagtaaggcaaccccgccagcctagccgggtcctcaacgacaggagcacgatcatgcgcacccgtggccaggacccaacgctgcccgagatgcgccgcgtgcggctgctggagatggcggacgcgatggatatgttctgccaagggttggtttgcgcattcacagttctccgcaagaattgattggctccaattcttggagtggtgaatccgttagcgaggtgccgccggcttccattcaggtcgaggtggcccggctccatgcaccgcgacgcaacgcggggaggcagacaaggtatagggcggcgcctacaatccatgccaacccgttccatgtgctcgccgaggcggcataaatcgccgtgacgatcagcggtccagtgatcgaagttaggctggtaagagccgcgagcgatccttgaagctgtccctgatggtcgtcatctacctgcctggacagcatggcctgcaacgcgggcatcccgatgccgccggaagcgagaagaatcataatggggaaggccatccagcctcgcgtcgcgaacgccagcaagacgtagcccagcgcgtcggccgccatgccggcgataatggcctgcttctcgccgaaacgtttggtggcgggaccagtgacgaaggcttgagcgagggcgtgcaagattccgaataccgcaagcgacaggccgatcatcgtcgcgctccagcgaaagcggtcctcgccgaaaatgacccagagcgctgccggcacctgtcctacgagttgcatgataaagaagacagtcataagtgcggcgacgatagtcatgccccgcgcccaccggaaggagctgactgggttgaaggctctcaagggcatcggtcgacgctctcccttatgcgactcctgcattaggaagcagcccagtagtaggttgaggccgttgagcaccgccgccgcaaggaatggtgcatgcaaggagatggcgcccaacagtcccccggccacggggcctgccaccatacccacgccgaaacaagcgctcatgagcccgaagtggcgagcccgatcttccccatcggtgatgtcggcgatataggcgccagcaaccgcacctgtggcgccggtgatgccggccacgatgcgtccggcgtagaggatccgggcttatcgactgcacggtgcaccaatgcttctggcgtcaggcagccatcggaagctgtggtatggctgtgcaggtcgtaaatcactgcataattcgtgtcgctcaaggcgcactcccgttctggataatgttttttgcgccgacatcataacggttctggcaaatattctgaaatgagctgttgacaattaatcatcggctcgtataatgtgtggaattgtgagcggataacaatttcacacaggaaaca

SEQ ID NO: 17 - DNA, 7988 bp, Artificial Sequence
  Description of Artificial Sequence: Synthetic polynucleotide
ctcgagggtaactagcctcgccgatcccgcaagaggcccggcagtcaggtggcacttttcggggaaatgtgcgcggaacccctatttgtttatttttctaaatacattcaaatatgtatccgctcatgagacaataaccctgataaatgcttcaataatattgaaaaaggaagagtatgagtattcaacatttccgtgtcgcccttattcccttttttgcggcattttgccttcctgtttttgctcacccagaaacgctggtgaaagtaaaagatgctgaagatcagttgggtgcacgagtgggttacatcgaactggatctcaacagcggtaagatccttgagagttttcgccccgaagaacgttttccaatgatgagcacttttaaagttctgctatgtggcgcggtattatcccgtattgacgccgggcaagagcaactcggtcgccgcatacactattctcagaatgacttggttgagtactcaccagtcacagaaaagcatcttacggatggcatgacagtaagagaattatgcagtgctgccataaccatgagtgataacactgcggccaacttacttctgacaacgatcggaggaccgaaggagctaaccgcttttttgcacaacatgggggatcatgtaactcgccttgatcgttgggaaccggagctgaatgaagccataccaaacgacgagcgtgacaccacgatgcctgtagcaatggcaacaacgttgcgcaaactattaactggcgaactacttactctagcttcccggcaacaattaatagactggatggaggcggataaagttgcaggaccacttctgcgctcggcccttccggctggctggtttattgctgataaatctggagccggtgagcgtgggtctcgcggtatcattgcagcactggggccagatggtaagccctcccgtatcgtagttatctacacgacggggagtcaggcaactatggatgaacgaaatagacagatcgctgagataggtgcctcactgattaagcattggtaactgtcagaccaagtttactcatatatactttagattgatttaaaacttcatttttaatttaaaaggatctaggtgaagatcctttttgataatctcatgaccaaaatcccttaacgtgagttttcgttccactgagcgtcagaccccgtagaaaagatcaaaggatcttcttgagatcctttttttctgcgcgtaatctgctgcttgcaaacaaaaaaaccaccgctaccagcggtggtttgtttgccggatcaagagctaccaactctttttccgaaggtaactggcttcagcagagcgcagataccaaatactgtccttctagtgtagccgtagttaggccaccacttcaagaactctgtagcaccgcctacatacctcgctctgctaatcctgttaccagtggctgctgccagtggcgataagtcgtgtcttaccgggttggactcaagacgatagttaccggataaggcgcagcggtcgggctgaacggggggttcgtgcacacagcccagcttggagcgaacgacctacaccgaactgagatacctacagcgtgagctatgagaaagcgccacgcttcccgaagggagaaaggcggacaggtatccggtaagcggcagggtcggaacaggagagcgcacgagggagcttccagggggaaacgcctggtatctttatagtcctgtcgggtttcgccacctctgacttgagcgtcgatttttgtgatgctcgtcaggggggcggagcctatggaaaaacgccagcaacgcggcctttttacggttcctggccttttgctggccttttgctcacatgttctttcctgcgttatcccctgattctgtggataaccgtattaccgcctttgagtgagctgataccgctcgccgcagccgaacgaccgagcgcagcgagtcagtgagcgaggaagcggaagagcgcccaatacgcatgcttaagttattggtatgactggttttaagcgcaaaaaaagttgctttttcgtacctattaatgtatcgttttagaaaaccgactgtaaaaagtacagtcggcattatctcatattataaaagccagtcattaggcctatctgacaattcctgaatagagttcataaacaatcctgcatgataaccatcacaaacagaatgatgtacctgtaaagatagcggtaaatatattgaattacctttattaatgaattttcctgctgtaataatgggtagaaggtaattactattattattgatatttaagttaaacccagtaaatgaagtccatggaataatagaaagagaaaaagcattttcaggtataggtgttttgggaaacaatttccccgaaccattatatttctctacatcagaaaggtataaatcataaaactctttgaagtcattctttacaggagtccaaataccagagaatgttttagatacaccatcaaaaattgtataaagtggctctaacttatcccaataacctaactctccgtcgctattgtaaccagttctaaaagctgtatttgagtttatcacccttgtcactaagaaaataaatgcagggtaaaatttatatccttcttgttttatgtttcggtataaaacactaatatcaatttctgtggttatactaaaagtcgtttgttggttcaaataatgattaaatatctcttttctcttccaattgtctaaatcaattttattaaagttcatttgatatgcctcctaaatttttatctaaagtgaatttaggaggcttacttgtctgctttcttcattagaatcaatccttttttaaaagtcaatattactgtaacataaatatatattttaaaaatatcccactttatccaattttcgtttgttgaactaatgggtgctttagttgaagaataaagaccacattaaaaaatgtggtcttttgtgtttttttaaaggatttgagcgtagcgaaaaatccttttctttcttatcttgataataagggtaactattgccgatcgtccattccgacagcatcgccagtcactatggcgtgctgctagcgccattcgccattcaggctgcgcaactgttgggaagggcgatcggtgcgggcctcttcgctattacgccagctggcgaaagggggatgtgctgcaaggcgattaagttgggtaacgccagggttttcccagtcacgacgttgtaaaacgacggccagtgaattcgagctcaggccttaactcacattaattgcgttgcgctcactgcccgctttccagtcgggaaacctgtcgtgccagctgcattaatgaatcggccaacgcgcggggagaggcggtttgcgtattgggcgccagggtggtttttcttttcaccagtgagacgggcaacagctgattgcccttcaccgcctggccctgagagagttgcagcaagcggtccacgctggtttgccccagcaggcgaaaatcctgtttgatggtggttgacggcgggatataacatgagctgtcttcggtatcgtcgtatcccactaccgagatatccgcaccaacgcgcagcccggactcggtaatggcgcgcattgcgcccagcgccatctgatcgttggcaaccagcatcgcagtgggaacgatgccctcattcagcatttgcatggtttgttgaaaaccggacatggcactccagtcgccttcccgttccgctatcggctgaatttgattgcgagtgagatatttatgccagccagccagacgcagacgcgccgagacagaacttaatgggcccgctaacagcgcgatttgctggtgacccaatgcgaccagatgctccacgcccagtcgcgtaccgtcttcatgggagaaaataatactgttgatgggtgtctggtcagagacatcaagaaataacgccggaacattagtgcaggcagcttccacagcaatggcatcctggtcatccagcggatagttaatgatcagcccactgacgcgttgcgcgagaagattgtgcaccgccgctttacaggcttcgacgccgcttcgttctaccatcgacaccaccacgctggcacccagttgatcggcgcgagatttaatcgccgcgacaatttgcgacggcgcgtgcagggccagactggaggtggcaacgccaatcagcaacgactgtttgcccgccagttgttgtgccacgcggttgggaatgtaattcagctccgccatcgccgcttccacttttcccgcgtttgcagaaacgtggctggcctggttcaccacgcgggaaacggtctgataagagacaccggcatactctgcgacatcgtataacgttactggtttcatcaaaatcgtctccctccgtttgaatatttgattgatcgtaaccagatgaagcactctttccactatccctacagtgttatggcttgaacaatcacgaaacaataattggtacgtacgatctttcagccgactcaaacatcaaatcttacaaatgtagtctttgaaagtattacatatgtaagatttaaatgcaaccgttttttcggaaggaaatgatgacctcgtttccaccggaattagcttggtaccagctattgtaacataatcggtacgggggtgaaaaagctaacggaaaagggagcggaaaagaatgatgtaagcgtgaaaaattttttatcttatcacttgaaattggaagggagattctttattataagaattgtggaattgtgagcggataacaattcccaattaaaggaggaaggatctatgcgcggaagccatcaccatcaccatcaccatcacggatcctctagagtcgacgtccccggggcagcccgcctaatgagcgggcttttttcacgtcacgcgtccatggagatctttgtctgcaactgaaaagtttataccttacctggaacaaatggttgaaacatacgaggctaatatcggcttattaggaatagtccctgtactaataaaatcaggtggatcagttgatcagtatattttggacgaagctcggaaagaatttggagatgacttgcttaattccacaattaaattaagggaaagaataaagcgatttgatgttcaaggaatcacggaagaagatactcatgataaagaagctctaaactattcataaccttacatggaattgatcgaagggtggaaggttaatggtacgaaattaggggatctacctagaaagcacaaggcgataggtcaagcttaaagaacccttacatggatcttacagattctgaaagtaaagaaacaacagaggttaaacaaacagaaccaaaaagaaaaaaagcattgttgaaaacaatgaaagttgatgtttcaatccataataagattaaatcgctgcacgaaattctggcagcatccgaagggaattcatattacttagaggatactattgagagagctattgataagatggttgagacattacctgagagccaaaaaactttttatgaatatgaattaaaaaaaagaaccaacaaaggctgagacagactccaaacgagtctgtttttttaaaaaaaatattaggagcattgaatatatattagagaattaagaaagacatgggaataaaaatattttaaatccagtaaaaatatgataagattatttcagaatatgaagaactctgtttgtttttgatgaaaaaacaaacaaaaaaaatccacctaacggaatctcaatttaactaacagcggccaaactgagaagttaaatttgagaaggggaaaaggcggatttatacttgtatttaactatctccattttaacattttattaaaccccatacaagtgaaaatcctcttttacactgttcctttaggtgatcgcggagggacattatgagtgaagtaaacctaaaaggaaatacagatgaattagtgtattatcgacagcaaaccactggaaataaaatcgccaggaagagaatcaaaaaagggaaagaagaagtttattatgttgctgaaacggaagagaagatatggacagaagagcaaataaaaaacttttctttagacaaatttggtacgcatataccttacatagaaggtcattatacaatcttaaataattacttctttgatttttggggctattttttaggtgctgaaggaattgcgctctatgctcacctaactcgttatgcatacggcagcaaagacttttgctttcctagtctacaaacaatcgctaaaaaaatggacaagactcctgttacagttagaggctacttgaaactgcttgaaaggtacggttttatttggaaggtaaacgtccgtaataaaaccaaggataacacagaggaatccccgatttttaagattagacgtaaggttcctttgctttcagaagaacttttaaatggaaaccctaatattgaaattccagatgacgaggaagcacatgtaaagaaggctttaaaaaaggaaaaagagggtcttccaaaggttttgaaaaaagagcacgatgaatttgttaaaaaaatgatggatgagtcagaaacaattaatattccagaggccttacaatatgacacaatgtatgaagatatactcagtaaaggagaaattcgaaaagaaatcaaaaaacaaatacctaatcctacaacatcttttgagagtatatcaatgacaactgaagaggaaaaagtcgacagtactttaaaaagcgaaatgcaaaatcgtgtctctaagccttcttttgatacctggtttaaaaacactaagatcaaaattgaaaataaaaattgtttattacttgtaccgagtgaatttgcatttgaatggattaagaaaagatatttagaaacaattaaaacagtccttgaagaagctggatatgttttcgaaaaaatcgaactaagaaaagtgcaataaactgctgaagtatttcagcagttttttttatttagaaatagtgaaaaaaatataatcagggaggtatcaatatttaatgagtactgatttaaatttatttagactggaattaataattaacacgtagactaattaaaatttaatgagggataaagaggatacaaaaatattaatttcaatccctattaaattttaacaagggggggattaaaatttaattagaggtttatccacaagaaaagaccctaataaaatttttactagggttataacactgattaatttcttaatgggggagggattaaaatttaatgacaaagaaaacaatcttttaagaaaagcttttaaaagataataataaaaagagctttgcgattaagcaaaactctttactttttcattgacattatcaaattcatcgatttcaaattgttgttgtatcataaagttaattctgttttgcacaaccttttcaggaatataaaacacatctgaggcttgttttataaactcagggtcgctaaagtcaatgtaacgtagcatatgatatggtatagcttccacccaagttagcctttctgcttcttctgaatgtttttcatatacttccatgggtatctctaaatgattttcctcatgtagcaaggtatgagcaaaaagtttatggaattgatagttcctctctttttcttcaacttttttatctaaaacaaacactttaacatctgagtcaatgtaagcataagatgtttttccagtcataatttcaatcccaaatcttttagacagaaattctggacgtaaatcttttggtgaaagaatttttttatgtagcaatatatccgatacagcaccttctaaaagcgttggtgaatagggcattttacctatctcctctcattttgtggaataaaaatagtcatattcgtccatctacctatcctattatcgaacagttgaactttttaatcaaggatcagtcctttttttcattattcttaaactgtgctcttaactttaacaactcgatttgtttttccagat

SEQ ID NO: 18 - DNA, 27 bp, Artificial Sequence
  Description of Artificial Sequence: Synthetic primer
ggaaggatccatgtccggtacgggtcg

SEQ ID NO: 19 - DNA, 26 bp, Artificial Sequence
  Description of Artificial Sequence: Synthetic primer
gggattagacggtaatcgcacgaccg

SEQ ID NO: 20 - DNA, 7794 bp, Artificial Sequence
  Description of Artificial Sequence: Synthetic polynucleotide
ggtggcggtacttgggtcgatatcaaagtgcatcacttcttcccgtatgcccaactttgtatagagagccactgcgggatcgtcaccgtaatctgcttgcacgtagatcacataagcaccaagcgcgttggcctcatgcttgaggagattgatgagcgcggtggcaatgccctgcctccggtgctcgccggagactgcgagatcatagatatagatctcactacgcggctgctcaaacttgggcagaacgtaagccgcgagagcgccaacaaccgcttcttggtcgaaggcagcaagcgcgatgaatgtcttactacggagcaagttcccgaggtaatcggagtccggctgatgttgggagtaggtggctacgtcaccgaactcacgaccgaaaagatcaagagcagcccgcatggatttgacttggtcagggccgagcctacatgtgcgaatgatgcccatacttgagccacctaactttgttttagggcgactgccctgctgcgtaacatcgttgctgctccataacatcaaacatcgacccacggcgtaacgcgcttgctgcttggatgcccgaggcatagactgtacaaaaaaacagtcataacaagccatgaaaaccgccactgcgccgttaccaccgctgcgttcggtcaaggttctggaccagttgcgtgagcgcatttttttttcctcctcggcgtttacgccccgccctgccactcatcgcagtactgttgtaattcattaagcattctgccgacatggaagccatcacagacggcatgatgaacctgaatcgccagcggcatcagcaccttgtcgccttgcgtataatatttgcccatagtgaaaacgggggcgaagaagttgtccatattggccacgtttaaatcaaaactggtgaaactcacccagggattggcgctgacgaaaaacatattctcaataaaccctttagggaaataggccaggttttcaccgtaacacgccacatcttgcgaatatatgtgtagaaactgccggaaatcgtcgtggtattcactccagagcgatgaaaacgtttcagtttgctcatggaaaacggtgtaacaagggtgaacactatcccatatcaccagctcaccgtctttcattgccatacggaactccggatgagcattcatcaggcgggcaagaatgtgaataaaggccggataaaacttgtgcttatttttctttacggtctttaaaaaggccgtaatatccagctgaacggtctggttataggtacattgagcaactgactgaaatgcctcaaaatgttctttacgatgccattgggatatatcaacggtggtatatccagtgatttttttctccatttttttttcctcctttagaaaaactcatcgagcatcaaatgaaactgcaatttattcatatcaggattatcaataccatatttttgaaaaagccgtttctgtaatgaaggagaaaactcaccgaggcagttccataggatggcaagatcctggtatcggtctgcgattccgactcgtccaacatcaatacaacctattaatttcccctcgtcaaaaataaggttatcaagtgagaaatcaccatgagtgacgactgaatccggtgagaatggcaaaagtttatgcatttctttccagacttgttcaacaggccagccattacgctcgtcatcaaaatcactcgcatcaaccaaaccgttattcattcgtgattgcgcctgagcgaggcgaaatacgcgatcgctgttaaaaggacaattacaaacaggaatcgagtgcaaccggcgcaggaacactgccagcgcatcaacaatattttcacctgaatcaggatattcttctaatacctggaacgctgtttttccggggatcgcagtggtgagtaaccatgcatcatcaggagtacggataaaatgcttgatggtcggaagtggcataaattccgtcagccagtttagtctgaccatctcatctgtaacatcattggcaacgctacctttgccatgtttcagaaacaactctggcgcatcgggcttcccatacaagcgatagattgtcgcacctgattgcccgacattatcgcgagcccatttatacccatataaatcagcatccatgttggaatttaatcgcggcctcgacgtttcccgttgaatatggctcatttttttttcctcctttaccaatgcttaatcagtgaggcacctatctcagcgatctgtctatttcgttcatccatagttgcctgactccccgtcgtgtagataactacgatacgggagggcttaccatctggccccagcgctgcgatgataccgcgagaaccacgctcaccggctccggatttatcagcaataaaccagccagccggaagggccgagcgcagaagtggtcctgcaactttatccgcctccatccagtctattaattgttgccgggaagctagagtaagtagttcgccagttaatagtttgcgcaacgttgttgccatcgctacaggcatcgtggtgtcacgctcgtcgtttggtatggcttcattcagctccggttcccaacgatcaaggcgagttacatgatcccccatgttgtgcaaaaaagcggttagctccttcggtcctccgatcgttgtcagaagtaagttggccgcagtgttatcactcatggttatggcagcactgcataattctcttactgtcatgccatccgtaagatgcttttctgtgactggtgagtactcaaccaagtcattctgagaatagtgtatgcggcgaccgagttgctcttgcccggcgtcaatacgggataataccgcgccacatagcagaactttaaaagtgctcatcattggaaaacgttcttcggggcgaaaactctcaaggatcttaccgctgttgagatccagttcgatgtaacccactcgtgcacccaactgatcttcagcatcttttactttcaccagcgtttctgggtgagcaaaaacaggaaggcaaaatgccgcaaaaaagggaataagggcgacacggaaatgttgaatactcatattcttcctttttcaatattattgaagcatttatcagggttattgtctcatgagcggatacatatttgaatgtatttagaaaaataaacaaataggggtcagtgttacaaccaattaaccaattctgaacattatcgcgagcccatttatacctgaatatggctcataacaccccttgtttgcctggcggcagtagcgcggtggtcccacctgaccccatgccgaactcagaagtgaaacgccgtagcgccgatggtagtgtggggactccccatgcgagagtagggaactgccaggcatcaaataaaacgaaaggctcagtcgaaagactgggcctttcgcccgggctaattgaggggtgtcgcccttattcgactctatagtgaagttcctattctctagaaagtataggaacttctgaagtggggtttaaactccctctgcccttccctcccgcttcatccttatttttggacaataaactagagaacaatttgaacttgaattggaattcagattcagagcaagagacaagaaacttccctttttcttctccacatattattatttattcgtgtattttcttttaacgatacgatacgatacgacacgatacgatacgacacgctactatacagtgacgtcagattgtactgagagtgcagattgtactgagagtgcaccataaattcccgttttaagagcttggtgagcgctaggagtcactgccaggtatcgtttgaacacggcattagtcagggaagtcataacacagtcctttcccgcaattttctttttctattactcttggcctcctctagtacactctatatttttttatgcctcggtaatgattttcatttttttttttcccctagcggatgactctttttttttcttagcgattggcattatcacataatgaattatacattatataaagtaatgtgatttcttcgaagaatatactaaaaaatgagcaggcaagataaacgaaggcaaagatgacagagcagaaagccctagtaaagcgtattacaaatgaaaccaagattcagattgcgatctctttaaagggtggtcccctagcgatagagcactcgatcttcccagaaaaagaggcagaagcagtagcagaacaggccacacaatcgcaagtgattaacgtccacacaggtatagggtttctggaccatatgatacatgctctggccaagcattccggctggtcgctaatcgttgagtgcattggtgacttacacatagacgaccatcacaccactgaagactgcgggattgctctcggtcaagcttttaaagaggccctactggcgcgtggagtaaaaaggtttggatcaggatttgcgcctttggatgaggcactttccagagcggtggtagatctttcgaacaggccgtacgcagttgtcgaacttggtttgcaaagggagaaagtaggagatctctcttgcgagatgatcccgcattttcttgaaagctttgcagaggctagcagaattaccctccacgttgattgtctgcgaggcaagaatgatcatcaccgtagtgagagtgcgttcaaggctcttgcggttgccataagagaagccacctcgcccaatggtaccaacgatgttccctccaccaaaggtgttcttatgtagtgacaccgattatttaaagctgcagcatacgatatatatacatgtgtatatatgtatacctatgaatgtcagtaagtatgtatacgaacagtatgatactgaagatgacaaggtaatgcatcattctatacgtgtcattctgaacgaggcgcgctttccttttttctttttgctttttctttttttttctcttgaactcgacggatctatgcggtgtgaaataccgcacaggtgtgaaataccgcacagtcatgagatccgataacttcttttctttttttttcttttctctctcccccgttgttgtctcaccatatccgcaatgacaaaaaaaatgatggaagacactaaaggaaaaaattaacgacaaagacagcaccaacagatgtcgttgttccagagctgatgaggggtatcttcgaacacacgaaactttttccttccttcattcacgcacactactctctaatgagcaacggtatacggccttccttccagttacttgaatttgaaataaaaaaagtttgccgctttgctatcaagtataaatagacctgcaattattaatcttttgtttcctcgtcattgttctcgttccctttcttccttgtttctttttctgcacaatatttcaagctataccaagcatacaatcaactccaacggatccgaatactagttggccaatcatgtaattagttatgtcacgcttacattcacgccctccccccacatccgctctaaccgaaaaggaaggagttagacaacctgaagtctaggtccctatttatttttttatagttatgttagtattaagaacgttatttatatttcaaatttttcttttttttctgtacagacgcgtgtacgcatgtaacattatactgaaaaccttgcttgagaaggttttgggacgctcgaaggctttaatttgcaagcttggccaccacacaccatagcttcaaaatgtttctactccttttttactcttccagattttctcggactccgcgcatcgccgtaccacttcaaaacacccaagcacagcatactaaattttccctctttcttcctctagggtgtcgttaattacccgtactaaaggtttggaaaagaaaaaagagaccgcctcgtttctttttcttcgtcgaaaaaggcaataaaaatttttatcacgtttctttttcttgaaatttttttttttagtttttttctctttcagtgacctccattgatatttaagttaataaacggtcttcaatttctcaagtttcagtttcatttttcttgttctattacaactttttttacttcttgttcattagaaagaaagcatagcaatctaatctaagggatgagcgaagaaagcttattcgagtcttctccacagaagatggagtacgaaattacaaactactcagaaagacatacagaacttccaggtcatttcattggcctcaatacagtagataaactagaggagtccccgttaagggactttgttaagagtcacggtggtcacacggtcatatccaagatcctgatagcaaataagtttaaacaaaatgaagtgaagttcctatactttctagagaataggaacttctatagtgagtcgaataagggcgacacaaaatttattctaaatgcataataaatactgataacatcttatagtttgtattatattttgtattatcgttgacatgtataattttgatatcaaaaactgattttccctttattattttcgagatttattttcttaattctctttaacaaactagaaatattgtatatacaaaaaatcataaataatagatgaatagtttaattataggtgttcatcaatcgaaaaagcaacgtatcttatttaaagtgcgttgcttttttctcatttataaggttaaataattctcatatatcaagcaaagtgacaggcgcccttaaatattctgacaaatgctctttccctaaactccccccataaaaaaacccgccgaagcgggtttttacgttatttgcggattaacgattactcgttatcagaaccgcccagggggcccgagcttaagactggccgtcgttttacaacacagaaagagtttgtagaaacgcaaaaaggccatccgtcaggggccttctgcttagtttgatgcctggcagttccctactctcgccttccgcttcctcgctcactgactcgctgcgctcggtcgttcggctgcggcgagcggtatcagctcactcaaaggcggtaatacggttatccacagaatcaggggataacgcaggaaagaacatgtgagcaaaaggccagcaaaaggccaggaaccgtaaaaaggccgcgttgctggcgtttttccataggctccgcccccctgacgagcatcacaaaaatcgacgctcaagtcagaggtggcgaaacccgacaggactataaagataccaggcgtttccccctggaagctccctcgtgcgctctcctgttccgaccctgccgcttaccggatacctgtccgcctttctcccttcgggaagcgtggcgctttctcatagctcacgctgtaggtatctcagttcggtgtaggtcgttcgctccaagctgggctgtgtgcacgaaccccccgttcagcccgaccgctgcgccttatccggtaactatcgtcttgagtccaacccggtaagacacgacttatcgccactggcagcagccactggtaacaggattagcagagcgaggtatgtaggcggtgctacagagttcttgaagtggtgggctaactacggctacactagaagaacagtatttggtatctgcgctctgctgaagccagttaccttcggaaaaagagttggtagctcttgatccggcaaacaaaccaccgctggtagcggtggtttttttgtttgcaagcagcagattacgcgcagaaaaaaaggatctcaagaagatcctttgatcttttctacggggtctgacgctcagtggaacgacgcgcgcgtaactcacgttaagggattttggtcatgagcttgcgccgtcccgtcaagtcagcgtaatgct

SEQ ID NO: 21 - DNA, 3710 bp, Artificial Sequence
  Description of Artificial Sequence: Synthetic polynucleotide
gatcggatccatggccggtacgggtcgtttggctggtaaaattgcattgatcaccggtggtgctggtaacattggttccgagctgacccgccgttttctggccgagggtgcgacggttattatcagcggccgtaaccgtgcgaagctgaccgcgctggccgagcgcatgcaagccgaggccggcgtgccggccaagcgcattgatttggaggtgatggatggttccgaccctgtggctgtccgtgccggtatcgaggcaatcgtcgctcgccacggtcagattgacattctggttaacaacgcgggctccgccggtgcccaacgtcgcttggcggaaattccgctgacggaggcagaattgggtccgggtgcggaggagactttgcacgcttcgatcgcgaatctgttgggcatgggttggcacctgatgcgtattgcggctccgcacatgccagttggctccgcagttatcaacgtttcgactattttctcgcgcgcagagtactatggtcgcattccgtacgttaccccgaaggcagcgctgaacgctttgtcccagctggctgcccgcgagctgggcgctcgtggcatccgcgttaacactattttcccaggtcctattgagtccgaccgcatccgtaccgtgtttcaacgtatggatcaactgaagggtcgcccggagggcgacaccgcccatcactttttgaacaccatgcgcctgtgccgcgcaaacgaccaaggcgctttggaacgccgctttccgtccgttggcgatgttgctgatgcggctgtgtttctggcttctgctgagagcgcggcactgtcgggtgagacgattgaggtcacccacggtatggaactgccggcgtgtagcgaaacctccttgttggcgcgtaccgatctgcgtaccatcgacgcgagcggtcgcactaccctgatttgcgctggcgatcaaattgaagaagttatggccctgacgggcatgctgcgtacgtgcggtagcgaagtgattatcggcttccgttctgcggctgccctggcgcaatttgagcaggcagtgaatgaatctcgccgtctggcaggtgcggatttcaccccgccgatcgctttgccgttggacccacgtgacccggccaccattgatgcggttttcgattggggcgcaggcgagaatacgggtggcatccatgcggcggtcattctgccggcaacctcccacgaaccggctccgtgcgtgattgaagtcgatgacgaacgcgtcctgaatttcctggccgatgaaattaccggcaccatcgttattgcgagccgtttggcgcgctattggcaatcccaacgcctgaccccgggtgcccgtgcccgcggtccgcgtgttatctttctgagcaacggtgccgatcaaaatggtaatgtttacggtcgtattcaatctgcggcgatcggtcaattgattcgcgtttggcgtcacgaggcggagttggactatcaacgtgcatccgccgcaggcgatcacgttctgccgccggtttgggcgaaccagattgtccgtttcgctaaccgctccctggaaggtctggagttcgcgtgcgcgtggaccgcacagctgctgcacagccaacgtcatattaacgaaattacgctgaacattccagccaatattagcgcgaccacgggcgcacgttccgccagcgtcggctgggccgagtccttgattggtctgcacctgggcaaggtggctctgattaccggtggttcggcgggcatcggtggtcaaatcggtcgtctgctggccttgtctggcgcgcgtgtgatgctggccgctcgcgatcgccataaattggaacagatgcaagccatgattcaaagcgaattggcggaggttggttataccgatgtggaggaccgtgtgcacatcgctccgggttgcgatgtgagcagcgaggcgcagctggcagatctggtggaacgtacgctgtccgcattcggtaccgtggattatttgattaataacgccggtattgcgggcgtggaggagatggtgatcgacatgccggtggaaggctggcgtcacaccctgtttgccaacctgatttcgaattattcgctgatgcgcaagttggcgccgctgatgaagaagcaaggtagcggttacatcctgaacgtttcttcctattttggcggtgagaaggacgcggcgattccttatccgaaccgcgccgactacgccgtctccaaggctggccaacgcgcgatggcggaagtgttcgctcgtttcctgggtccagagattcagatcaatgctattgccccaggtccggttgaaggcgaccgcctgcgtggtaccggtgagcgtccgggcctgtttgctcgtcgcgcccgtctgatcttggagaataaacgcctgaacgaattgcacgcggctttgattgctgcggcccgcaccgatgagcgctcgatgcacgagttggttgaattgttgctgccgaacgacgtggccgcgttggagcagaacccagcggcccctaccgcgctgcgtgagctggcacgccgcttccgtagcgaaggtgatccggcggcaagctcctcgtccgccttgctgaatcgctccatcgctgccaagctgttggctcgcttgcataacggtggctatgtgctgccggcggatatttttgcaaatctgcctaatccgccggacccgttctttacccgtgcgcaaattgaccgcgaagctcgcaaggtgcgtgatggtattatgggtatgctgtatctgcagcgtatgccaaccgagtttgacgtcgctatggcaaccgtgtactatctggccgatcgtaacgtgagcggcgaaactttccatccgtctggtggtttgcgctacgagcgtaccccgaccggtggcgagctgttcggcctgccatcgccggaacgtctggcggagctggttggtagcacggtgtacctgatcggtgaacacctgaccgagcacctgaacctgctggctcgtgcctatttggagcgctacggtgcccgtcaagtggtgatgattgttgagacggaaaccggtgcggaaaccatgcgtcgtctgttgcatgatcacgtcgaggcaggtcgcctgatgactattgtggcaggtgatcagattgaggcagcgattgaccaagcgatcacgcgctatggccgtccgggtccggtggtgtgcactccattccgtccactgccaaccgttccgctggtcggtcgtaaagactccgattggagcaccgttttgagcgaggcggaatttgcggaactgtgtgagcatcagctgacccaccatttccgtgttgctcgtaagatcgccttgtcggatggcgcgtcgctggcgttggttaccccggaaacgactgcgactagcaccacggagcaatttgctctggcgaacttcatcaagaccaccctgcacgcgttcaccgcgaccatcggtgttgagtcggagcgcaccgcgcaacgtattctgattaaccaggttgatctgacgcgccgcgcccgtgcggaagagccgcgtgacccgcacgagcgtcagcaggaattggaacgcttcattgaagccgttctgctggttaccgctccgctgcctcctgaggcagacacgcgctacgcaggccgtattcaccgcggtcgtgcgattaccgtcggatctagatctcaccatcaccaccattaaactagtgatc

SEQ ID NO: 22 - DNA, 6477 bp, Artificial Sequence
  Description of Artificial Sequence: Synthetic polynucleotide
aaactccctctgcccttccctcccgcttcatccttatttttggacaataaactagagaacaatttgaacttgaattggaattcagattcagagcaagagacaagaaacttccctttttcttctccacatattattatttattcgtgtattttcttttaacgatacgatacgatacgacacgatacgatacgacacgctactatacagtgacgtcagattgtactgagagtgcagattgtactgagagtgcaccataaattcccgttttaagagcttggtgagcgctaggagtcactgccaggtatcgtttgaacacggcattagtcagggaagtcataacacagtcctttcccgcaattttctttttctattactcttggcctcctctagtacactctatatttttttatgcctcggtaatgattttcatttttttttttcccctagcggatgactctttttttttcttagcgattggcattatcacataatgaattatacattatataaagtaatgtgatttcttcgaagaatatactaaaaaatgagcaggcaagataaacgaaggcaaagatgacagagcagaaagccctagtaaagcgtattacaaatgaaaccaagattcagattgcgatctctttaaagggtggtcccctagcgatagagcactcgatcttcccagaaaaagaggcagaagcagtagcagaacaggccacacaatcgcaagtgattaacgtccacacaggtatagggtttctggaccatatgatacatgctctggccaagcattccggctggtcgctaatcgttgagtgcattggtgacttacacatagacgaccatcacaccactgaagactgcgggattgctctcggtcaagcttttaaagaggccctactggcgcgtggagtaaaaaggtttggatcaggatttgcgcctttggatgaggcactttccagagcggtggtagatctttcgaacaggccgtacgcagttgtcgaacttggtttgcaaagggagaaagtaggagatctctcttgcgagatgatcccgcattttcttgaaagctttgcagaggctagcagaattaccctccacgttgattgtctgcgaggcaagaatgatcatcaccgtagtgagagtgcgttcaaggctcttgcggttgccataagagaagccacctcgcccaatggtaccaacgatgttccctccaccaaaggtgttcttatgtagtgacaccgattatttaaagctgcagcatacgatatatatacatgtgtatatatgtatacctatgaatgtcagtaagtatgtatacgaacagtatgatactgaagatgacaaggtaatgcatcattctatacgtgtcattctgaacgaggcgcgctttccttttttctttttgctttttctttttttttctcttgaactcgacggatctatgcggtgtgaaataccgcacaggtgtgaaataccgcacagtcatgagatccgataacttcttttctttttttttcttttctctctcccccgttgttgtctcaccatatccgcaatgacaaaaaaaatgatggaagacactaaaggaaaaaattaacgacaaagacagcaccaacagatgtcgttgttccagagctgatgaggggtatcttcgaacacacgaaactttttccttccttcattcacgcacactactctctaatgagcaacggtatacggccttccttccagttacttgaatttgaaataaaaaaagtttgccgctttgctatcaagtataaatagacctgcaattattaatcttttgtttcctcgtcattgttctcgttccctttcttccttgtttctttttctgcacaatatttcaagctataccaagcatacaatcaactccaacggatccatggccggtacgggtcgtttggctggtaaaattgcattgatcaccggtggtgctggtaacattggttccgagctgacccgccgttttctggccgagggtgcgacggttattatcagcggccgtaaccgtgcgaagctgaccgcgctggccgagcgcatgcaagccgaggccggcgtgccggccaagcgcattgatttggaggtgatggatggttccgaccctgtggctgtccgtgccggtatcgaggcaatcgtcgctcgccacggtcagattgacattctggttaacaacgcgggctccgccggtgcccaacgtcgcttggcggaaattccgctgacggaggcagaattgggtccgggtgcggaggagactttgcacgcttcgatcgcgaatctgttgggcatgggttggcacctgatgcgtattgcggctccgcacatgccagttggctccgcagttatcaacgtttcgactattttctcgcgcgcagagtactatggtcgcattccgtacgttaccccgaaggcagcgctgaacgctttgtcccagctggctgcccgcgagctgggcgctcgtggcatccgcgttaacactattttcccaggtcctattgagtccgaccgcatccgtaccgtgtttcaacgtatggatcaactgaagggtcgcccggagggcgacaccgcccatcactttttgaacaccatgcgcctgtgccgcgcaaacgaccaaggcgctttggaacgccgctttccgtccgttggcgatgttgctgatgcggctgtgtttctggcttctgctgagagcgcggcactgtcgggtgagacgattgaggtcacccacggtatggaactgccggcgtgtagcgaaacctccttgttggcgcgtaccgatctgcgtaccatcgacgcgagcggtcgcactaccctgatttgcgctggcgatcaaattgaagaagttatggccctgacgggcatgctgcgtacgtgcggtagcgaagtgattatcggcttccgttctgcggctgccctggcgcaatttgagcaggcagtgaatgaatctcgccgtctggcaggtgcggatttcaccccgccgatcgctttgccgttggacccacgtgacccggccaccattgatgcggttttcgattggggcgcaggcgagaatacgggtggcatccatgcggcggtcattctgccggcaacctcccacgaaccggctccgtgcgtgattgaagtcgatgacgaacgcgtcctgaatttcctggccgatgaaattaccggcaccatcgttattgcgagccgtttggcgcgctattggcaatcccaacgcctgaccccgggtgcccgtgcccgcggtccgcgtgttatctttctgagcaacggtgccgatcaaaatggtaatgtttacggtcgtattcaatctgcggcgatcggtcaattgattcgcgtttggcgtcacgaggcggagttggactatcaacgtgcatccgccgcaggcgatcacgttctgccgccggtttgggcgaaccagattgtccgtttcgctaaccgctccctggaaggtctggagttcgcgtgcgcgtggaccgcacagctgctgcacagccaacgtcatattaacgaaattacgctgaacattccagccaatattagcgcgaccacgggcgcacgttccgccagcgtcggctgggccgagtccttgattggtctgcacctgggcaaggtggctctgattaccggtggttcggcgggcatcggtggtcaaatcggtcgtctgctggccttgtctggcgcgcgtgtgatgctggccgctcgcgatcgccataaattggaacagatgcaagccatgattcaaagcgaattggcggaggttggttataccgatgtggaggaccgtgtgcacatcgctccgggttgcgatgtgagcagcgaggcgcagctggcagatctggtggaacgtacgctgtccgcattcggtaccgtggattatttgattaataacgccggtattgcgggcgtggaggagatggtgatcgacatgccggtggaaggctggcgtcacaccctgtttgccaacctgatttcgaattattcgctgatgcgcaagttggcgccgctgatgaagaagcaaggtagcggttacatcctgaacgtttcttcctattttggcggtgagaaggacgcggcgattccttatccgaaccgcgccgactacgccgtctccaaggctggccaacgcgcgatggcggaagtgttcgctcgtttcctgggtccagagattcagatcaatgctattgccccaggtccggttgaaggcgaccgcctgcgtggtaccggtgagcgtccgggcctgtttgctcgtcgcgcccgtctgatcttggagaataaacgcctgaacgaattgcacgcggctttgattgctgcggcccgcaccgatgagcgctcgatgcacgagttggttgaattgttgctgccgaacgacgtggccgcgttggagcagaacccagcggcccctaccgcgctgcgtgagctggcacgccgcttccgtagcgaaggtgatccggcggcaagctcctcgtccgccttgctgaatcgctccatcgctgccaagctgttggctcgcttgcataacggtggctatgtgctgccggcggatatttttgcaaatctgcctaatccgccggacccgttctttacccgtgcgcaaattgaccgcgaagctcgcaaggtgcgtgatggtattatgggtatgctgtatctgcagcgtatgccaaccgagtttgacgtcgctatggcaaccgtgtactatctggccgatcgtaacgtgagcggcgaaactttccatccgtctggtggtttgcgctacgagcgtaccccgaccggtggcgagctgttcggcctgccatcgccggaacgtctggcggagctggttggtagcacggtgtacctgatcggtgaacacctgaccgagcacctgaacctgctggctcgtgcctatttggagcgctacggtgcccgtcaagtggtgatgattgttgagacggaaaccggtgcggaaaccatgcgtcgtctgttgcatgatcacgtcgaggcaggtcgcctgatgactattgtggcaggtgatcagattgaggcagcgattgaccaagcgatcacgcgctatggccgtccgggtccggtggtgtgcactccattccgtccactgccaaccgttccgctggtcggtcgtaaagactccgattggagcaccgttttgagcgaggcggaatttgcggaactgtgtgagcatcagctgacccaccatttccgtgttgctcgtaagatcgccttgtcggatggcgcgtcgctggcgttggttaccccggaaacgactgcgactagcaccacggagcaatttgctctggcgaacttcatcaagaccaccctgcacgcgttcaccgcgaccatcggtgttgagtcggagcgcaccgcgcaacgtattctgattaaccaggttgatctgacgcgccgcgcccgtgcggaagagccgcgtgacccgcacgagcgtcagcaggaattggaacgcttcattgaagccgttctgctggttaccgctccgctgcctcctgaggcagacacgcgctacgcaggccgtattcaccgcggtcgtgcgattaccgtcggatctagatctcaccatcaccaccattaaactagttggccaatcatgtaattagttatgtcacgcttacattcacgccctccccccacatccgctctaaccgaaaaggaaggagttagacaacctgaagtctaggtccctatttatttttttatagttatgttagtattaagaacgttatttatatttcaaatttttcttttttttctgtacagacgcgtgtacgcatgtaacattatactgaaaaccttgcttgagaaggttttgggacgctcgaaggctttaatttgcaagcttggccaccacacaccatagcttcaaaatgtttctactccttttttactcttccagattttctcggactccgcgcatcgccgtaccacttcaaaacacccaagcacagcatactaaattttccctctttcttcctctagggtgtcgttaattacccgtactaaaggtttggaaaagaaaaaagagaccgcctcgtttctttttcttcgtcgaaaaaggcaataaaaatttttatcacgtttctttttcttgaaatttttttttttagtttttttctctttcagtgacctccattgatatttaagttaataaacggtcttcaatttctcaagtttcagtttcatttttcttgttctattacaactttttttacttcttgttcattagaaagaaagcatagcaatctaatctaagggatgagcgaagaaagcttattcgagtcttctccacagaagatggagtacgaaattacaaactactcagaaagacatacagaacttccaggtcatttcattggcctcaatacagtagataaactagaggagtccccgttaagggactttgttaagagtcacggtggtcacacggtcatatccaagatcctgatagcaaataagttt

SEQ ID NO: 23 - DNA, 6233 bp, Artificial Sequence
  Description of Artificial Sequence: Synthetic polynucleotide
tcgcgcgtttcggtgatgacggtgaaaacctctgacacatgcagctcccggagacggtcacagcttgtctgtaagcggatgccgggagcagacaagcccgtcagggcgcgtcagcgggtgttggcgggtgtcggggctggcttaactatgcggcatcagagcagattgtactgagagtgcaccatagccatcctcatgaaaactgtgtaacataataaccgaagtgtcgaaaaggtggcaccttgtccaattgaacacgctcgatgaaaaaaataagatatatataaggttaagtaaagcgtctgttagaaaggaagtttttcctttttcttgctctcttgtcttttcatctactatttccttcgtgtaatacagggtcgtcagatacatagatacaattctattacccccatccatacaatgccatctcatttcgatactgttcaactacacgccggccaagagaaccctggtgacaatgctcacagatccagagctgtaccaatttacgccaccacttcttatgttttcgaaaactctaagcatggttcgcaattgtttggtctagaagttccaggttacgtctattcccgtttccaaaacccaaccagtaatgttttggaagaaagaattgctgctttagaaggtggtgctgctgctttggctgtttcctccggtcaagccgctcaaacccttgccatccaaggtttggcacacactggtgacaacatcgtttccacttcttacttatacggtggtacttataaccagttcaaaatctcgttcaaaagatttggtatcgaggctagatttgttgaaggtgacaatccagaagaattcgaaaaggtctttgatgaaagaaccaaggctgtttatttggaaaccattggtaatccaaagtacaatgttccggattttgaaaaaattgttgcaattgctcacaaacacggtattccagttgtcgttgacaacacatttggtgccggtggttacttctgtcagccaattaaatacggtgctgatattgtaacacattctgctaccaaatggattggtggtcatggtactactatcggtggtattattgttgactctggtaagttcccatggaaggactacccagaaaagttccctcaattctctcaacctgccgaaggatatcacggtactatctacaatgaagcctacggtaacttggcatacatcgttcatgttagaactgaactattaagagatttgggtccattgatgaacccatttgcctctttcttgctactacaaggtgttgaaacattatctttgagagctgaaagacacggtgaaaatgcattgaagttagccaaatggttagaacaatccccatacgtatcttgggtttcataccctggtttagcatctcattctcatcatgaaaatgctaagaagtatctatctaacggtttcggtggtgtcttatctttcggtgtaaaagacttaccaaatgccgacaaggaaactgacccattcaaactttctggtgctcaagttgttgacaatttaaagcttgcctctaacttggccaatgttggtgatgccaagaccttagtcattgctccatacttcactacccacaaacaattaaatgacaaagaaaagttggcatctggtgttaccaaggacttaattcgtgtctctgttggtatcgaatttattgatgacattattgcagacttccagcaatcttttgaaactgttttcgctggccaaaaaccatgagtgtgcgtaatgagttgtaaaattatgtataaacctactttctctcacaagttatgcggtgtgaaataccgcacagatgcgtaaggagaaaataccgcatcaggaaattgtaaacgttaatattttgttaaaattcgcgttaaatttttgttaaatcagctcattttttaaccaataggccgaaatcggcaaaatcccttataaatcaaaagaatagaccgagatagggttgagtgttgttccagtttggaacaagagtccactattaaagaacgtggactccaacgtcaaagggcgaaaaaccgtctatcagggcgatggcccactacgtgaaccatcaccctaatcaagttttttggggtcgaggtgccgtaaagcactaaatcggaaccctaaagggagcccccgatttagagcttgacggggaaagccggcgaacgtggcgagaaaggaagggaagaaagcgaaaggagcgggcgctagggcgctggcaagtgtagcggtcacgctgcgcgtaaccaccacacccgccgcgcttaatgcgccgctacagggcgcgtcgcgccattcgccattcaggctgcgcaactgttgggaagggcgatcggtgcgggcctcttcgctattacgccagctggcgaaagggggatgtgctgcaaggcgattaagttgggtaacgccagggttttcccagtcacgacgttgtaaaacgacggccagtgagcgcgcgtaatacgactcactatagggcgaattgggtaccgggccccccctcgaggtcgacggtatcgataagcttgatatcgaattcctgcagcccgggggatccactagttctagagcggccgccaccgcggtggagctccagcttttgttccctttagtgagggttaattgcgcgcttggcgtaatcatggtcatagctgtttcctgtgtgaaattgttatccgctcacaattccacacaacatacgagccggaagcataaagtgtaaagcctggggtgcctaatgagtgagctaactcacattaattgcgttgcgctcactgcccgctttccagtcgggaaacctgtcgtgccagctgcattaatgaatcggccaacgcgcggggagaggcggtttgcgtattgggcgctcttccgcttcctcgctcactgactcgctgcgctcggtcgttcggctgcggcgagcggtatcagctcactcaaaggcggtaatacggttatccacagaatcaggggataacgcaggaaagaacatgtgagcaaaaggccagcaaaaggccaggaaccgtaaaaaggccgcgttgctggcgtttttccataggctccgcccccctgacgagcatcacaaaaatcgacgctcaagtcagaggtggcgaaacccgacaggactataaagataccaggcgtttccccctggaagctccctcgtgcgctctcctgttccgaccctgccgcttaccggatacctgtccgcctttctcccttcgggaagcgtggcgctttctcatagctcacgctgtaggtatctcagttcggtgtaggtcgttcgctccaagctgggctgtgtgcacgaaccccccgttcagcccgaccgctgcgccttatccggtaactatcgtcttgagtccaacccggtaagacacgacttatcgccactggcagcagccactggtaacaggattagcagagcgaggtatgtaggcggtgctacagagttcttgaagtggtggcctaactacggctacactagaaggacagtatttggtatctgcgctctgctgaagccagttaccttcggaaaaagagttggtagctcttgatccggcaaacaaaccaccgctggtagcggtggtttttttgtttgcaagcagcagattacgcgcagaaaaaaaggatctcaagaagatcctttgatcttttctacggggtctgacgctcagtggaacgaaaactcacgttaagggattttggtcatgagattatcaaaaaggatcttcacctagatccttttaaattaaaaatgaagttttaaatcaatctaaagtatatatgagtaaacttggtctgacagttaccaatgcttaatcagtgaggcacctatctcagcgatctgtctatttcgttcatccatagttgcctgactccccgtcgtgtagataactacgatacgggagggcttaccatctggccccagtgctgcaatgataccgcgagacccacgctcaccggctccagatttatcagcaataaaccagccagccggaagggccgagcgcagaagtggtcctgcaactttatccgcctccatccagtctattaattgttgccgggaagctagagtaagtagttcgccagttaatagtttgcgcaacgttgttgccattgctacaggcatcgtggtgtcacgctcgtcgtttggtatggcttcattcagctccggttcccaacgatcaaggcgagttacatgatcccccatgttgtgcaaaaaagcggttagctccttcggtcctccgatcgttgtcagaagtaagttggccgcagtgttatcactcatggttatggcagcactgcataattctcttactgtcatgccatccgtaagatgcttttctgtgactggtgagtactcaaccaagtcattctgagaatagtgtatgcggcgaccgagttgctcttgcccggcgtcaatacgggataataccgcgccacatagcagaactttaaaagtgctcatcattggaaaacgttcttcggggcgaaaactctcaaggatcttaccgctgttgagatccagttcgatgtaacccactcgtgcacccaactgatcttcagcatcttttactttcaccagcgtttctgggtgagcaaaaacaggaaggcaaaatgccgcaaaaaagggaataagggcgacacggaaatgttgaatactcatactcttcctttttcaatattattgaagcatttatcagggttattgtctcatgagcggatacatatttgaatgtatttagaaaaataaacaaataggggttccgcgcacatttccccgaaaagtgccacctgaacgaagcatctgtgcttcattttgtagaacaaaaatgcaacgcgagagcgctaatttttcaaacaaagaatctgagctgcatttttacagaacagaaatgcaacgcgaaagcgctattttaccaacgaagaatctgtgcttcatttttgtaaaacaaaaatgcaacgcgagagcgctaatttttcaaacaaagaatctgagctgcatttttacagaacagaaatgcaacgcgagagcgctattttaccaacaaagaatctatacttcttttttgttctacaaaaatgcatcccgagagcgctatttttctaacaaagcatcttagattactttttttctcctttgtgcgctctataatgcagtctcttgataactttttgcactgtaggtccgttaaggttagaagaaggctactttggtgtctattttctcttccataaaaaaagcctgactccacttcccgcgtttactgattactagcgaagctgcgggtgcattttttcaagataaaggcatccccgattatattctataccgatgtggattgcgcatactttgtgaacagaaagtgatagcgttgatgattcttcattggtcagaaaattatgaacggtttcttctattttgtctctatatactacgtataggaaatgtttacattttcgtattgttttcgattcactctatgaatagttcttactacaatttttttgtctaaagagtaatactagagataaacataaaaaatgtagaggtcgagtttagatgcaagttcaaggagcgaaaggtggatgggtaggttatatagggatatagcacagagatatatagcaaagagatacttttgagcaatgtttgtggaagcggtattcgcaatattttagtagctcgttacagtccggtgcgtttttggttttttgaaagtgcgtcttcagagcgcttttggttttcaaaagcgctctgaagttcctatactttctagagaataggaacttcggaataggaacttcaaagcgtttccgaaaacgagcgcttccgaaaatgcaacgcgagctgcgcacatacagctcactgttcacgtcgcacctatatctgcgtgttgcctgtatatatatatacatgagaagaacggcatagtgcgtgtttatgcttaaatgcgtacttatatgcgtctatttatgtaggatgaaaggtagtctagtacctcctgtgatattatcccattccatgcggggtatcgtatgcttccttcagcactaccctttagctgttctatatgctgccactcctcaattggattagtctcatccttcaatgctatcatttcctttgatattggatcactaagaaaccattattatcatgacattaacctataaaaataggcgtatcacgaggccctttcgtc

SEQ ID NO: 24 - DNA, 12710 bp, Artificial Sequence
  Description of Artificial Sequence: Synthetic polynucleotide
tcgcgcgtttcggtgatgacggtgaaaacctctgacacatgcagctcccggagacggtcacagcttgtctgtaagcggatgccgggagcagacaagcccgtcagggcgcgtcagcgggtgttggcgggtgtcggggctggcttaactatgcggcatcagagcagattgtactgagagtgcaccatagccatcctcatgaaaactgtgtaacataataaccgaagtgtcgaaaaggtggcaccttgtccaattgaacacgctcgatgaaaaaaataagatatatataaggttaagtaaagcgtctgttagaaaggaagtttttcctttttcttgctctcttgtcttttcatctactatttccttcgtgtaatacagggtcgtcagatacatagatacaattctattacccccatccatacaatgccatctcatttcgatactgttcaactacacgccggccaagagaaccctggtgacaatgctcacagatccagagctgtaccaatttacgccaccacttcttatgttttcgaaaactctaagcatggttcgcaattgtttggtctagaagttccaggttacgtctattcccgtttccaaaacccaaccagtaatgttttggaagaaagaattgctgctttagaaggtggtgctgctgctttggctgtttcctccggtcaagccgctcaaacccttgccatccaaggtttggcacacactggtgacaacatcgtttccacttcttacttatacggtggtacttataaccagttcaaaatctcgttcaaaagatttggtatcgaggctagatttgttgaaggtgacaatccagaagaattcgaaaaggtctttgatgaaagaaccaaggctgtttatttggaaaccattggtaatccaaagtacaatgttccggattttgaaaaaattgttgcaattgctcacaaacacggtattccagttgtcgttgacaacacatttggtgccggtggttacttctgtcagccaattaaatacggtgctgatattgtaacacattctgctaccaaatggattggtggtcatggtactactatcggtggtattattgttgactctggtaagttcccatggaaggactacccagaaaagttccctcaattctctcaacctgccgaaggatatcacggtactatctacaatgaagcctacggtaacttggcatacatcgttcatgttagaactgaactattaagagatttgggtccattgatgaacccatttgcctctttcttgctactacaaggtgttgaaacattatctttgagagctgaaagacacggtgaaaatgcattgaagttagccaaatggttagaacaatccccatacgtatcttgggtttcataccctggtttagcatctcattctcatcatgaaaatgctaagaagtatctatctaacggtttcggtggtgtcttatctttcggtgtaaaagacttaccaaatgccgacaaggaaactgacccattcaaactttctggtgctcaagttgttgacaatttaaagcttgcctctaacttggccaatgttggtgatgccaagaccttagtcattgctccatacttcactacccacaaacaattaaatgacaaagaaaagttggcatctggtgttaccaaggacttaattcgtgtctctgttggtatcgaatttattgatgacattattgcagacttccagcaatcttttgaaactgttttcgctggccaaaaaccatgagtgtgcgtaatgagttgtaaaattatgtataaacctactttctctcacaagttatgcggtgtgaaataccgcacagatgcgtaaggagaaaataccgcatcaggaaattgtaaacgttaatattttgttaaaattcgcgttaaatttttgttaaatcagctcattttttaaccaataggccgaaatcggcaaaatcccttataaatcaaaagaatagaccgagatagggttgagtgttgttccagtttggaacaagagtccactattaaagaacgtggactccaacgtcaaagggcgaaaaaccgtctatcagggcgatggcccactacgtgaaccatcaccctaatcaagttttttggggtcgaggtgccgtaaagcactaaatcggaaccctaaagggagcccccgatttagagcttgacggggaaagccggcgaacgtggcgagaaaggaagggaagaaagcgaaaggagcgggcgctagggcgctggcaagtgtagcggtcacgctgcgcgtaaccaccacacccgccgcgcttaatgcgccgctacagggcgcgtcgcgccattcgccattcaggctgcgcaactgttgggaagggcgatcggtgcgggcctcttcgctattacgccagctggcgaaagggggatgtgctgcaaggcgattaagttgggtaacgccagggttttcccagtcacgacgttgtaaaacgacggccagtgagcgcgcgtaatacgactcactatagggcgaattgggtaccgggccccccctcgaggtcgacggtatcgataagcttgatatcgaattcctgcagcccaaactccctctgcccttccctcccgcttcatccttatttttggacaataaactagagaacaatttgaacttgaattggaattcagattcagagcaagagacaagaaacttccctttttcttctccacatattattatttattcgtgtattttcttttaacgatacgatacgatacgacacgatacgatacgacacgctactatacagtgacgtcagattgtactgagagtgcagattgtactgagagtgcaccataaattcccgttttaagagcttggtgagcgctaggagtcactgccaggtatcgtttgaacacggcattagtcagggaagtcataacacagtcctttcccgcaattttctttttctattactcttggcctcctctagtacactctatatttttttatgcctcggtaatgattttcatttttttttttcccctagcggatgactctttttttttcttagcgattggcattatcacataatgaattatacattatataaagtaatgtgatttcttcgaagaatatactaaaaaatgagcaggcaagataaacgaaggcaaagatgacagagcagaaagccctagtaaagcgtattacaaatgaaaccaagattcagattgcgatctctttaaagggtggtcccctagcgatagagcactcgatcttcccagaaaaagaggcagaagcagtagcagaacaggccacacaatcgcaagtgattaacgtccacacaggtatagggtttctggaccatatgatacatgctctggccaagcattccggctggtcgctaatcgttgagtgcattggtgacttacacatagacgaccatcacaccactgaagactgcgggattgctctcggtcaagcttttaaagaggccctactggcgcgtggagtaaaaaggtttggatcaggatttgcgcctttggatgaggcactttccagagcggtggtagatctttcgaacaggccgtacgcagttgtcgaacttggtttgcaaagggagaaagtaggagatctctcttgcgagatgatcccgcattttcttgaaagctttgcagaggctagcagaattaccctccacgttgattgtctgcgaggcaagaatgatcatcaccgtagtgagagtgcgttcaaggctcttgcggttgccataagagaagccacctcgcccaatggtaccaacgatgttccctccaccaaaggtgttcttatgtagtgacaccgattatttaaagctgcagcatacgatatatatacatgtgtatatatgtatacctatgaatgtcagtaagtatgtatacgaacagtatgatactgaagatgacaaggtaatgcatcattctatacgtgtcattctgaacgaggcgcgctttccttttttctttttgctttttctttttttttctcttgaactcgacggatctatgcggtgtgaaataccgcacaggtgtgaaataccgcacagtcatgagatccgataacttcttttctttttttttcttttctctctcccccgttgttgtctcaccatatccgcaatgacaaaaaaaatgatggaagacactaaaggaaaaaattaacgacaaagacagcaccaacagatgtcgttgttccagagctgatgaggggtatcttcgaacacacgaaactttttccttccttcattcacgcacactactctctaatgagcaacggtatacggccttccttccagttacttgaatttgaaataaaaaaagtttgccgctttgctatcaagtataaatagacctgcaattattaatcttttgtttcctcgtcattgttctcgttccctttcttccttgtttctttttctgcacaatatttcaagctataccaagcatacaatcaactccaacggatccatggccggtacgggtcgtttggctggtaaaattgcattgatcaccggtggtgctggtaacattggttccgagctgacccgccgttttctggccgagggtgcgacggttattatcagcggccgtaaccgtgcgaagctgaccgcgctggccgagcgcatgcaagccgaggccggcgtgccggccaagcgcattgatttggaggtgatggatggttccgaccctgtggctgtccgtgccggtatcgaggcaatcgtcgctcgccacggtcagattgacattctggttaacaacgcgggctccgccggtgcccaacgtcgcttggcggaaattccgctgacggaggcagaattgggtccgggtgcggaggagactttgcacgcttcgatcgcgaatctgttgggcatgggttggcacctgatgcgtattgcggctccgcacatgccagttggctccgcagttatcaacgtttcgactattttctcgcgcgcagagtactatggtcgcattccgtacgttaccccgaaggcagcgctgaacgctttgtcccagctggctgcccgcgagctgggcgctcgtggcatccgcgttaacactattttcccaggtcctattgagtccgaccgcatccgtaccgtgtttcaacgtatggatcaactgaagggtcgcccggagggcgacaccgcccatcactttttgaacaccatgcgcctgtgccgcgcaaacgaccaaggcgctttggaacgccgctttccgtccgttggcgatgttgctgatgcggctgtgtttctggcttctgctgagagcgcggcactgtcgggtgagacgattgaggtcacccacggtatggaactgccggcgtgtagcgaaacctccttgttggcgcgtaccgatctgcgtaccatcgacgcgagcggtcgcactaccctgatttgcgctggcgatcaaattgaagaagttatggccctgacgggcatgctgcgtacgtgcggtagcgaagtgattatcggcttccgttctgcggctgccctggcgcaatttgagcaggcagtgaatgaatctcgccgtctggcaggtgcggatttcaccccgccgatcgctttgccgttggacccacgtgacccggccaccattgatgcggttttcgattggggcgcaggcgagaatacgggtggcatccatgcggcggtcattctgccggcaacctcccacgaaccggctccgtgcgtgattgaagtcgatgacgaacgcgtcctgaatttcctggccgatgaaattaccggcaccatcgttattgcgagccgtttggcgcgctattggcaatcccaacgcctgaccccgggtgcccgtgcccgcggtccgcgtgttatctttctgagcaacggtgccgatcaaaatggtaatgtttacggtcgtattcaatctgcggcgatcggtcaattgattcgcgtttggcgtcacgaggcggagttggactatcaacgtgcatccgccgcaggcgatcacgttctgccgccggtttgggcgaaccagattgtccgtttcgctaaccgctccctggaaggtctggagttcgcgtgcgcgtggaccgcacagctgctgcacagccaacgtcatattaacgaaattacgctgaacattccagccaatattagcgcgaccacgggcgcacgttccgccagcgtcggctgggccgagtccttgattggtctgcacctgggcaaggtggctctgattaccggtggttcggcgggcatcggtggtcaaatcggtcgtctgctggccttgtctggcgcgcgtgtgatgctggccgctcgcgatcgccataaattggaacagatgcaagccatgattcaaagcgaattggcggaggttggttataccgatgtggaggaccgtgtgcacatcgctccgggttgcgatgtgagcagcgaggcgcagctggcagatctggtggaacgtacgctgtccgcattcggtaccgtggattatttgattaataacgccggtattgcgggcgtggaggagatggtgatcgacatgccggtggaaggctggcgtcacaccctgtttgccaacctgatttcgaattattcgctgatgcgcaagttggcgccgctgatgaagaagcaaggtagcggttacatcctgaacgtttcttcctattttggcggtgagaaggacgcggcgattccttatccgaaccgcgccgactacgccgtctccaaggctggccaacgcgcgatggcggaagtgttcgctcgtttcctgggtccagagattcagatcaatgctattgccccaggtccggttgaaggcgaccgcctgcgtggtaccggtgagcgtccgggcctgtttgctcgtcgcgcccgtctgatcttggagaataaacgcctgaacgaattgcacgcggctttgattgctgcggcccgcaccgatgagcgctcgatgcacgagttggttgaattgttgctgccgaacgacgtggccgcgttggagcagaacccagcggcccctaccgcgctgcgtgagctggcacgccgcttccgtagcgaaggtgatccggcggcaagctcctcgtccgccttgctgaatcgctccatcgctgccaagctgttggctcgcttgcataacggtggctatgtgctgccggcggatatttttgcaaatctgcctaatccgccggacccgttctttacccgtgcgcaaattgaccgcgaagctcgcaaggtgcgtgatggtattatgggtatgctgtatctgcagcgtatgccaaccgagtttgacgtcgctatggcaaccgtgtactatctggccgatcgtaacgtgagcggcgaaactttccatccgtctggtggtttgcgctacgagcgtaccccgaccggtggcgagctgttcggcctgccatcgccggaacgtctggcggagctggttggtagcacggtgtacctgatcggtgaacacctgaccgagcacctgaacctgctggctcgtgcctatttggagcgctacggtgcccgtcaagtggtgatgattgttgagacggaaaccggtgcggaaaccatgcgtcgtctgttgcatgatcacgtcgaggcaggtcgcctgatgactattgtggcaggtgatcagattgaggcagcgattgaccaagcgatcacgcgctatggccgtccgggtccggtggtgtgcactccattccgtccactgccaaccgttccgctggtcggtcgtaaagactccgattggagcaccgttttgagcgaggcggaatttgcggaactgtgtgagcatcagctgacccaccatttccgtgttgctcgtaagatcgccttgtcggatggcgcgtcgctggcgttggttaccccggaaacgactgcgactagcaccacggagcaatttgctctggcgaacttcatcaagaccaccctgcacgcgttcaccgcgaccatcggtgttgagtcggagcgcaccgcgcaacgtattctgattaaccaggttgatctgacgcgccgcgcccgtgcggaagagccgcgtgacccgcacgagcgtcagcaggaattggaacgcttcattgaagccgttctgctggttaccgctccgctgcctcctgaggcagacacgcgctacgcaggccgtattcaccgcggtcgtgcgattaccgtcggatctagatctcaccatcaccaccattaaactagttggccaatcatgtaattagttatgtcacgcttacattcacgccctccccccacatccgctctaaccgaaaaggaaggagttagacaacctgaagtctaggtccctatttatttttttatagttatgttagtattaagaacgttatttatatttcaaatttttcttttttttctgtacagacgcgtgtacgcatgtaacattatactgaaaaccttgcttgagaaggttttgggacgctcgaaggctttaatttgcaagcttggccaccacacaccatagcttcaaaatgtttctactccttttttactcttccagattttctcggactccgcgcatcgccgtaccacttcaaaacacccaagcacagcatactaaattttccctctttcttcctctagggtgtcgttaattacccgtactaaaggtttggaaaagaaaaaagagaccgcctcgtttctttttcttcgtcgaaaaaggcaataaaaatttttatcacgtttctttttcttgaaatttttttttttagtttttttctctttcagtgacctccattgatatttaagttaataaacggtcttcaatttctcaagtttcagtttcatttttcttgttctattacaactttttttacttcttgttcattagaaagaaagcatagcaatctaatctaagggatgagcgaagaaagcttattcgagtcttctccacagaagatggagtacgaaattacaaactactcagaaagacatacagaacttccaggtcatttcattggcctcaatacagtagataaactagaggagtccccgttaagggactttgttaagagtcacggtggtcacacggtcatatccaagatcctgatagcaaataagtttgggggatccactagttctagagcggccgccaccgcggtggagctccagcttttgttccctttagtgagggttaattgcgcgcttggcgtaatcatggtcatagctgtttcctgtgtgaaattgttatccgctcacaattccacacaacatacgagccggaagcataaagtgtaaagcctggggtgcctaatgagtgagctaactcacattaattgcgttgcgctcactgcccgctttccagtcgggaaacctgtcgtgccagctgcattaatgaatcggccaacgcgcggggagaggcggtttgcgtattgggcgctcttccgcttcctcgctcactgactcgctgcgctcggtcgttcggctgcggcgagcggtatcagctcactcaaaggcggtaatacggttatccacagaatcaggggataacgcaggaaagaacatgtgagcaaaaggccagcaaaaggccaggaaccgtaaaaaggccgcgttgctggcgtttttccataggctccgcccccctgacgagcatcacaaaaatcgacgctcaagtcagaggtggcgaaacccgacaggactataaagataccaggcgtttccccctggaagctccctcgtgcgctctcctgttccgaccctgccgcttaccggatacctgtccgcctttctcccttcgggaagcgtggcgctttctcatagctcacgctgtaggtatctcagttcggtgtaggtcgttcgctccaagctgggctgtgtgcacgaaccccccgttcagcccgaccgctgcgccttatccggtaactatcgtcttgagtccaacccggtaagacacgacttatcgccactggcagcagccactggtaacaggattagcagagcgaggtatgtaggcggtgctacagagttcttgaagtggtggcctaactacggctacactagaaggacagtatttggtatctgcgctctgctgaagccagttaccttcggaaaaagagttggtagctcttgatccggcaaacaaaccaccgctggtagcggtggtttttttgtttgcaagcagcagattacgcgcagaaaaaaaggatctcaagaagatcctttgatcttttctacggggtctgacgctcagtggaacgaaaactcacgttaagggattttggtcatgagattatcaaaaaggatcttcacctagatccttttaaattaaaaatgaagttttaaatcaatctaaagtatatatgagtaaacttggtctgacagttaccaatgcttaatcagtgaggcacctatctcagcgatctgtctatttcgttcatccatagttgcctgactccccgtcgtgtagataactacgatacgggagggcttaccatctggccccagtgctgcaatgataccgcgagacccacgctcaccggctccagatttatcagcaataaaccagccagccggaagggccgagcgcagaagtggtcctgcaactttatccgcctccatccagtctattaattgttgccgggaagctagagtaagtagttcgccagttaatagtttgcgcaacgttgttgccattgctacaggcatcgtggtgtcacgctcgtcgtttggtatggcttcattcagctccggttcccaacgatcaaggcgagttacatgatcccccatgttgtgcaaaaaagcggttagctccttcggtcctccgatcgttgtcagaagtaagttggccgcagtgttatcactcatggttatggcagcactgcataattctcttactgtcatgccatccgtaagatgcttttctgtgactggtgagtactcaaccaagtcattctgagaatagtgtatgcggcgaccgagttgctcttgcccggcgtcaatacgggataataccgcgccacatagcagaactttaaaagtgctcatcattggaaaacgttcttcggggcgaaaactctcaaggatcttaccgctgttgagatccagttcgatgtaacccactcgtgcacccaactgatcttcagcatcttttactttcaccagcgtttctgggtgagcaaaaacaggaaggcaaaatgccgcaaaaaagggaataagggcgacacggaaatgttgaatactcatactcttcctttttcaatattattgaagcatttatcagggttattgtctcatgagcggatacatatttgaatgtatttagaaaaataaacaaataggggttccgcgcacatttccccgaaaagtgccacctgaacgaagcatctgtgcttcattttgtagaacaaaaatgcaacgcgagagcgctaatttttcaaacaaagaatctgagctgcatttttacagaacagaaatgcaacgcgaaagcgctattttaccaacgaagaatctgtgcttcatttttgtaaaacaaaaatgcaacgcgagagcgctaatttttcaaacaaagaatctgagctgcatttttacagaacagaaatgcaacgcgagagcgctattttaccaacaaagaatctatacttcttttttgttctacaaaaatgcatcccgagagcgctatttttctaacaaagcatcttagattactttttttctcctttgtgcgctctataatgcagtctcttgataactttttgcactgtaggtccgttaaggttagaagaaggctactttggtgtctattttctcttccataaaaaaagcctgactccacttcccgcgtttactgattactagcgaagctgcgggtgcattttttcaagataaaggcatccccgattatattctataccgatgtggattgcgcatactttgtgaacagaaagtgatagcgttgatgattcttcattggtcagaaaattatgaacggtttcttctattttgtctctatatactacgtataggaaatgtttacattttcgtattgttttcgattcactctatgaatagttcttactacaatttttttgtctaaagagtaatactagagataaacataaaaaatgtagaggtcgagtttagatgcaagttcaaggagcgaaaggtggatgggtaggttatatagggatatagcacagagatatatagcaaagagatacttttgagcaatgtttgtggaagcggtattcgcaatattttagtagctcgttacagtccggtgcgtttttggttttttgaaagtgcgtcttcagagcgcttttggttttcaaaagcgctctgaagttcctatactttctagagaataggaacttcggaataggaacttcaaagcgtttccgaaaacgagcgcttccgaaaatgcaacgcgagctgcgcacatacagctcactgttcacgtcgcacctatatctgcgtgttgcctgtatatatatatacatgagaagaacggcatagtgcgtgtttatgcttaaatgcgtacttatatgcgtctatttatgtaggatgaaaggtagtctagtacctcctgtgatattatcccattccatgcggggtatcgtatgcttccttcagcactaccctttagctgttctatatgctgccactcctcaattggattagtctcatccttcaatgctatcatttcctttgatattggatcactaagaaaccattattatcatgacattaacctataaaaataggcgtatcacgaggccctttcgtc

SEQ ID NO: 25 - DNA, 23 bp, Artificial Sequence
  Description of Artificial Sequence: Synthetic primer
gacaatatacaaacgcgattctc

SEQ ID NO: 26 - DNA, 23 bp, Artificial Sequence
  Description of Artificial Sequence: Synthetic primer
tgagactgaaatattgacgttga

SEQ ID NO: 27 - DNA, 660 bp, Escherichia coli
gtgaaagagattattgatggattccttaaattccagcgcgaggcatttccgaagcgggaagccttgtttaaacagctggcgacacagcaaagcccgcgcacactttttatctcctgctccgacagccgtctggtccctgagctggtgacgcaacgtgagcctggcgatctgttcgttattcgcaacgcgggcaatatcgtcccttcctacgggccggaacccggtggcgtttctgcttcggtggagtatgccgtcgctgcgcttcgggtatctgacattgtgatttgtggtcattccaactgtggcgcgatgaccgccattgccagctgtcagtgcatggaccatatgcctgccgtctcccactggctgcgttatgccgattcagcccgcgtcgttaatgaggcgcgcccgcattccgatttaccgtcaaaagctgcggcgatggtacgtgaaaacgtcattgctcagttggctaatttgcaaactcatccatcggtgcgcctggcgctcgaagaggggcggatcgccctgcacggctgggtctacgacattgaaagcggcagcatcgcagcttttgacggcgcaacccgccagtttgtgccactggccgctaatcctcgcgtttgtgccataccgctacgccaaccgaccgcagcgtaa

SEQ ID NO: 28 - DNA, 780 bp, Escherichia coli
atgggttttctttccggtaagcgcattctggtaaccggtgttgccagcaaactatccatcgcctacggtatcgctcaggcgatgcaccgcgaaggagctgaactggcattcacctaccagaacgacaaactgaaaggccgcgtagaagaatttgccgctcaattgggttctgacatcgttctgcagtgcgatgttgcagaagatgccagcatcgacaccatgttcgctgaactggggaaagtttggccgaaatttgacggtttcgtacactctattggttttgcacctggcgatcagctggatggtgactatgttaacgccgttacccgtgaaggcttcaaaattgcccacgacatcagctcctacagcttcgttgcaatggcaaaagcttgccgctccatgctgaatccgggttctgccctgctgaccctttcctaccttggcgctgagcgcgctatcccgaactacaacgttatgggtctggcaaaagcgtctctggaagcgaacgtgcgctatatggcgaacgcgatgggtccggaaggtgtgcgtgttaacgccatctctgctggtccgatccgtactctggcggcctccggtatcaaagacttccgcaaaatgctggctcattgcgaagccgttaccccgattcgccgtaccgttactattgaagatgtgggtaactctgcggcattcctgtgctccgatctctctgccggtatcttcggtgaagtggtccacgttgacggcggtttcagcattgctgcaatgaacgaactcgaa

SEQ ID NO: 29 - protein, 262 aa, Escherichia coli
MGFLSGKRILVTGVASKLSIAYGIAQAMHREGAELAFTYQNDKLKGRVEEFAAQLGSDIVLQCDVAEDASIDTMFAELGKVWPKFDGFVHSIGFAPGDQLDGDYVNAVTREGFKIAHDISSYSFVAMAKACRSMLNPGSALLTLSYLGAERAIPNYNVMGLAKASLEANVRYMANAMGPEGVRVNAISAGPIRTLAASGIKDFRKMLAHCEAVTPIRRTVTIEDVGNSAAFLCSDLSAGIFGEVVHVDGGFSIAAMNELELK

SEQ ID NO: 30 - DNA, 960 bp, Escherichia coli
atgagtctgaatttccttgattttgaacagccgattgcagagctggaagcgaaaatcgattctctgactgcggttagccgtcaggatgagaaactggatattaacatcgatgaagaagtgcatcgtctgcgtgaaaaaagcgtagaactgacacgtaaaatcttcgccgatctcggtgcatggcagattgcgcaactggcacgccatccacagcgtccttataccctggattacgttcgcctggcatttgatgaatttgacgaactggctggcgaccgcgcgtatgcagacgataaagctatcgtcggtggtatcgcccgtctcgatggtcgtccggtgatgatcattggtcatcaaaaaggtcgtgaaaccaaagaaaaaattcgccgtaactttggtatgccagcgccagaaggttaccgcaaagcactgcgtctgatgcaaatggctgaacgctttaagatgcctatcatcacctttatcgacaccccgggggcttatcctggcgtgggcgcagaagagcgtggtcagtctgaagccattgcacgcaacctgcgtgaaatgtctcgcctcggcgtaccggtagtttgtacggttatcggtgaaggtggttctggcggtgcgctggcgattggcgtgggcgataaagtgaatatgctgcaatacagcacctattccgttatctcgccggaaggttgtgcgtccattctgtggaagagcgccgacaaagcgccgctggcggctgaagcgatgggtatcattgctccgcgtctgaaagaactgaaactgatcgactccatcatcccggaaccactgggtggtgctcaccgtaacccggaagcgatggcggcatcgttgaaagcgcaactgctggcggatctggccgatctcgacgtgttaagcactgaagatttaaaaaatcgtcgttatcagcgcctgatgagctacggttacgcgtaa

SEQ ID NO: 31 - protein, 319 aa, Escherichia coli
MSLNFLDFEQPIAELEAKIDSLTAVSRQDEKLDINIDEEVHRLREKSVELTRKIFADLGAWQIAQLARHPQRPYTLDYVRLAFDEFDELAGDRAYADDKAIVGGIARLDGRPVMIIGHQKGRETKEKIRRNFGMPAPEGYRKALRLMQMAERFKMPIITFIDTPGAYPGVGAEERGQSEAIARNLREMSRLGVPVVCTVIGEGGSGGALAIGVGDKVNMLQYSTYSVISPEGCASILWKSADKAPLAAEAMGIIAPRLKELKLIDSIIPEPLGGAHRNPEAMAASLKAQLLADLADLDVLSTEDLKNRRYQRLMSYGYA

SEQ ID NO: 32 - DNA, 471 bp, Escherichia coli
atggatattcgtaagattaaaaaactgatcgagctggttgaagaatcaggcatctccgaactggaaatttctgaaggcgaagagtcagtacgcattagccgtgcagctcctgccgcaagtttccctgtgatgcaacaagcttacgctgcaccaatgatgcagcagccagctcaatctaacgcagccgctccggcgaccgttccttccatggaagcgccagcagcagcggaaatcagtggtcacatcgtacgttccccgatggttggtactttctaccgcaccccaagcccggacgcaaaagcgttcatcgaagtgggtcagaaagtcaacgtgggcgataccctgtgcatcgttgaagccatgaaaatgatgaaccagatcgaagcggacaaatccggtaccgtgaaagcaattctggtcgaaagtggacaaccggtagaatttgacgagccgctggtcgtcatcgagtaa

SEQ ID NO: 33 - protein, 156 aa, Escherichia coli
MDIRKIKKLIELVEESGISELEISEGEESVRISRAAPAASFPVMQQAYAAPMMQQPAQSNAAAPATVPSMEAPAAAEISGHIVRSPMVGTFYRTPSPDAKAFIEVGQKVNVGDTLCIVEAMKMMNQIEADKSGTVKAILVESGQPVEFDEPLVVIE

SEQ ID NO: 34 - DNA, 1350 bp, Escherichia coli
atgctggataaaattgttattgccaaccgcggcgagattgcattgcgtattcttcgtgcctgtaaagaactgggcatcaagactgtcgctgtgcactccagcgcggatcgcgatctaaaacacgtattactggcagatgaaacggtctgtattggccctgctccgtcagtaaaaagttatctgaacatcccggcaatcatcagcgccgctgaaatcaccggcgcagtagcaatccatccgggttacggcttcctctccgagaacgccaactttgccgagcaggttgaacgctccggctttatcttcattggcccgaaagcagaaaccattcgcctgatgggcgacaaagtatccgcaatcgcggcgatgaaaaaagcgggcgtcccttgcgtaccgggttctgacggcccgctgggcgacgatatggataaaaaccgtgccattgctaaacgcattggttatccggtgattatcaaagcctccggcggcggcggcggtcgcggtatgcgcgtagtgcgcggcgacgctgaactggcacaatccatctccatgacccgtgcggaagcgaaagctgctttcagcaacgatatggtttacatggagaaatacctggaaaatcctcgccacgtcgagattcaggtactggctgacggtcagggcaacgctatctatctggcggaacgtgactgctccatgcaacgccgccaccagaaagtggtcgaagaagcgccagcaccgggcattaccccggaactgcgtcgctacatcggcgaacgttgcgctaaagcgtgtgttgatatcggctatcgcggtgcaggtactttcgagttcctgttcgaaaacggcgagttctatttcatcgaaatgaacacccgtattcaggtagaacacccggttacagaaatgatcaccggcgttgacctgatcaaagaacagctgcgtatcgctgccggtcaaccgctgtcgatcaagcaagaagaagttcacgttcgcggccatgcggtggaatgtcgtatcaacgccgaagatccgaacaccttcctgccaagtccgggcaaaatcacccgtttccacgcacctggcggttttggcgtacgttgggagtctcatatctacgcgggctacaccgtaccgccgtactatgactcaatgatcggtaagctgatttgctacggtgaaaaccgtgacgtggcgattgcccgcatgaagaatgcgctgcaggagctgatcatcgacggtatcaaaaccaacgttgatctgcagatccgcatcatgaatgacgagaacttccagcatggtggcactaacatccactatctggagaaaaaactcggtcttcaggaaaaataa

SEQ ID NO: 35 - protein, 449 aa, Escherichia coli
MLDKIVIANRGEIALRILRACKELGIKTVAVHSSADRDLKHVLLADETVCIGPAPSVKSYLNIPAIISAAEITGAVAIHPGYGFLSENANFAEQVERSGFIFIGPKAETIRLMGDKVSAIAAMKKAGVPCVPGSDGPLGDDMDKNRAIAKRIGYPVIIKASGGGGGRGMRVVRGDAELAQSISMTRAEAKAAFSNDMVYMEKYLENPRHVEIQVLADGQGNAIYLAERDCSMQRRHQKVVEEAPAPGITPELRRYIGERCAKACVDIGYRGAGTFEFLFENGEFYFIEMNTRIQVEHPVTEMITGVDLIKEQLRIAAGQPLSIKQEEVHVRGHAVECRINAEDPNTFLPSPGKITRFHAPGGFGVRWESHIYAGYTVPPYYDSMIGKLICYGENRDVAIARMKNALQELIIDGIKTNVDLQIRIMNDENFQHGGTNIHYLEKKLGLQEK

SEQ ID NO: 36 - DNA, 915 bp, Escherichia coli
atgagctggattgaacgaattaaaagcaacattactcccacccgcaaggcgagcattcctgaaggggtgtggactaagtgtgatagctgcggtcaggttttataccgcgctgagctggaacgtaatcttgaggtctgtccgaagtgtgaccatcacatgcgtatgacagcgcgtaatcgcctgcatagcctgttagatgaaggaagccttgtggagctgggtagcgagcttgagccgaaagatgtgctgaagtttcgtgactccaagaagtataaagaccgtctggcatctgcgcagaaagaaaccggcgaaaaagatgcgctggtggtgatgaaaggcactctgtatggaatgccggttgtcgctgcggcattcgagttcgcctttatgggcggttcaatggggtctgttgtgggtgcacgtttcgtgcgtgccgttgagcaggcgctggaagataactgcccgctgatctgcttctccgcctctggtggcgcacgtatgcaggaagcactgatgtcgctgatgcagatggcgaaaacctctgcggcactggcaaaaatgcaggagcgcggcttgccgtacatctccgtgctgaccgacccgacgatgggcggtgtttctgcaagtttcgccatgctgggcgatctcaacatcgctgaaccgaaagcgttaatcggctttgccggtccgcgtgttatcgaacagaccgttcgcgaaaaactgccgcctggattccagcgcagtgaattcctgatcgagaaaggcgcgatcgacatgatcgtccgtcgtccggaaatgcgcctgaaactggcgagcattctggcgaagttgatgaatctgccagcgccgaatcctgaagcgccgcgtgaaggcgtagtggtacccccggtaccggatcaggaacctgaggcctga

SEQ ID NO: 37 - protein, 304 aa, Escherichia coli
MSWIERIKSNITPTRKASIPEGVWTKCDSCGQVLYRAELERNLEVCPKCDHHMRMTARNRLHSLLDEGSLVELGSELEPKDVLKFRDSKKYKDRLASAQKETGEKDALVVMKGTLYGMPVVAAAFEFAFMGGSMGSVVGARFVRAVEQALEDNCPLICFSASGGARMQEALMSLMQMAKTSAALAKMQERGLPYISVLTDPTMGGVSASFAMLGDLNIAEPKALIGFAGPRVIEQTVREKLPPGFQRSEFLIEKGAIDMIVRRPEMRLKLASILAKLMNLPAPNPEAPREGVVVPPVPDQEPEA

SEQ ID NO: 38 - DNA, 1533 bp, Escherichia coli
atgcgaattggcataccaagagaacggttaaccaatgaaacccgtgttgcagcaacgccaaaaacagtggaacagctgctgaaactgggttttaccgtcgcggtagagagcggcgcgggtcaactggcaagttttgacgataaagcgtttgtgcaagcgggcgctgaaattgtagaagggaatagcgtctggcagtcagagatcattctgaaggtcaatgcgccgttagatgatgaaattgcgttactgaatcctgggacaacgctggtgagttttatctggcctgcgcagaatccggaattaatgcaaaaacttgcggaacgtaacgtgaccgtgatggcgatggactctgtgccgcgtatctcacgcgcacaatcgctggacgcactaagctcgatggcgaacatcgccggttatcgcgccattgttgaagcggcacatgaatttgggcgcttctttaccgggcaaattactgcggccgggaaagtgccaccggcaaaagtgatggtgattggtgcgggtgttgcaggtctggccgccattggcgcagcaaacagtctcggcgcgattgtgcgtgcattcgacacccgcccggaagtgaaagaacaagttcaaagtatgggcgcggaattcctcgagctggattttaaagaggaagctggcagcggcgatggctatgccaaagtgatgtcggacgcgttcatcaaagcggaaatggaactctttgccgcccaggcaaaagaggtcgatatcattgtcaccaccgcgcttattccaggcaaaccagcgccgaagctaattacccgtgaaatggttgactccatgaaggcgggcagtgtgattgtcgacctggcagcccaaaacggcggcaactgtgaatacaccgtgccgggtgaaatcttcactacggaaaatggtgtcaaagtgattggttataccgatcttccgggccgtctgccgacgcaatcctcacagctttacggcacaaacctcgttaatctgctgaaactgttgtgcaaagagaaagacggcaatatcactgttgattttgatgatgtggtgattcgcggcgtgaccgtgatccgtgcgggcgaaattacctggccggcaccgccgattcaggtatcagctcagccgcaggcggcacaaaaagcggcaccggaagtgaaaactgaggaaaaatgtacctgctcaccgtggcgtaaatacgcgttgatggcgctggcaatcattctttttggctggatggcaagcgttgcgccgaaagaattccttgggcacttcaccgttttcgcgctggcctgcgttgtcggttattacgtggtgtggaatgtatcgcacgcgctgcatacaccgttgatgtcggtcaccaacgcgatttcagggattattgttgtcggagcactgttgcagattggccagggcggctgggttagcttccttagttttatcgcggtgcttatagccagcattaatattttcggtggcttcaccgtgactcagcgcatgctgaaaatgttccgcaaaaattaa

SEQ ID NO: 39 - protein, 510 aa, Escherichia coli
MRIGIPRERLTNETRVAATPKTVEQLLKLGFTVAVESGAGQLASFDDKAFVQAGAEIVEGNSVWQSEIILKVNAPLDDEIALLNPGTTLVSFIWPAQNPELMQKLAERNVTVMAMDSVPRISRAQSLDALSSMANIAGYRAIVEAAHEFGRFFTGQITAAGKVPPAKVMVIGAGVAGLAAIGAANSLGAIVRAFDTRPEVKEQVQSMGAEFLELDFKEEAGSGDGYAKVMSDAFIKAEMELFAAQAKEVDIIVTTALIPGKPAPKLITREMVDSMKAGSVIVDLAAQNGGNCEYTVPGEIFTTENGVKVIGYTDLPGRLPTQSSQLYGTNLVNLLKLLCKEKDGNITVDFDDVVIRGVTVIRAGEITWPAPPIQVSAQPQAAQKAAPEVKTEEKCTCSPWRKYALMALAIILFGWMASVAPKEFLGHFTVFALACVVGYYVVWNVSHALHTPLMSVTNAISGIIVVGALLQIGQGGWVSFLSFIAVLIASINIFGGFTVTQRMLKMFRKN

SEQ ID NO: 40 - DNA, 1389 bp, Escherichia coli
atgtctggaggattagttacagctgcatacattgttgccgcgatcctgtttatcttcagtctggccggtctttcgaaacatgaaacgtctcgccagggtaacaacttcggtatcgccgggatggcgattgcgttaatcgcaaccatttttggaccggatacgggtaatgttggctggatcttgctggcgatggtcattggtggggcaattggtatccgtctggcgaagaaagttgaaatgaccgaaatgccagaactggtggcgatcctgcatagcttcgtgggtctggcggcagtgctggttggctttaacagctatctgcatcatgacgcgggaatggcaccgattctggtcaatattcacctgacggaagtgttcctcggtatcttcatcggggcggtaacgttcacgggttcggtggtggcgttcggcaaactgtgtggcaagatttcgtctaaaccattgatgctgccaaaccgtcacaaaatgaacctggcggctctggtcgtttccttcctgctgctgattgtatttgttcgcacggacagcgtcggcctgcaagtgctggcattgctgataatgaccgcaattgcgctggtattcggctggcatttagtcgcctccatcggtggtgcagatatgccagtggtggtgtcgatgctgaactcgtactccggctgggcggctgcggctgcgggctttatgctcagcaacgacctgctgattgtgaccggtgcgctggtcggttcttcgggggctatcctttcttacattatgtgtaaggcgatgaaccgttcctttatcagcgttattgcgggtggtttcggcaccgacggctcttctactggcgatgatcaggaagtgggtgagcaccgcgaaatcaccgcagaagagacagcggaactgctgaaaaactcccattcagtgatcattactccggggtacggcatggcagtcgcgcaggcgcaatatcctgtcgctgaaattactgagaaattgcgcgctcgtggtattaatgtgcgtttcggtatccacccggtcgcggggcgtttgcctggacatatgaacgtattgctggctgaagcaaaagtaccgtatgacatcgtgctggaaatggacgagatcaatgatgactttgctgataccgataccgtactggtgattggtgctaacgatacggttaacccggcggcgcaggatgatccgaagagtccgattgctggtatgcctgtgctggaagtgtggaaagcgcagaacgtgattgtctttaaacgttcgatgaacactggctatgctggtgtgcaaaacccgctgttcttcaaggaaaacacccacatgctgtttggtgacgccaaagccagcgtggatgcaatcctgaaagctctgtaa

SEQ ID NO: 41 - protein, 462 aa, Escherichia coli
MSGGLVTAAYIVAAILFIFSLAGLSKHETSRQGNNFGIAGMAIALIATIFGPDTGNVGWILLAMVIGGAIGIRLAKKVEMTEMPELVAILHSFVGLAAVLVGFNSYLHHDAGMAPILVNIHLTEVFLGIFIGAVTFTGSVVAFGKLCGKISSKPLMLPNRHKMNLAALVVSFLLLIVFVRTDSVGLQVLALLIMTAIALVFGWHLVASIGGADMPVVVSMLNSYSGWAAAAAGFMLSNDLLIVTGALVGSSGAILSYIMCKAMNRSFISVIAGGFGTDGSSTGDDQEVGEHREITAEETAELLKNSHSVIITPGYGMAVAQAQYPVAEITEKLRARGINVRFGIHPVAGRLPGHMNVLLAEAKVPYDIVLEMDEINDDFADTDTVLVIGANDTVNPAAQDDPKSPIAGMPVLEVWKAQNVIVFKRSMNTGYAGVQNPLFFKENTHMLFGDAKASVDAILKAL

SEQ ID NO: 42 - protein, 1219 aa, Chloroflexus aurantiacus
MSGTGRLAGKIALITGGAGNIGSELTRRFLAEGATVIISGRNRAKLTALAERMQAEAGVPAKRIDLEVMDGSDPVAVRAGIEAIVARHGQIDILVNNAGSAGAQRRLAEIPLTEAELGPGAEETLHASIANLLGMGWHLMRIAAPHMPVGSAVINVSTIFSRAEYYGRIPYVTPKAALNALSQLAARELGARGIRVNTIFPGPIESDRIRTVFQRMDQLKGRPEGDTAHHFLNTMRLCRANDQGALERRFPSVGDVADAAVFLASAESAALSGETIEVTHGMELPACSETSLLARTDLRTIDASGRTTLICAGDQIEEVMALTGMLRTCGSEVIIGFRSAAALAQFEQAVNESRRLAGADFTPPIALPLDPRDPATIDAVFDWAGENTGGIHAAVILPATSHEPAPCVIEVDDERVLNFLADEITGTIVIASRLARYWQSQRLTPGARARGPRVIFLSNGADQNGNVYGRIQSAAIGQLIRVWRHEAELDYQRASAAGDHVLPPVWANQIVRFANRSLEGLEFACAWTAQLLHSQRHINEITLNIPANISATTGARSASVGWAESLIGLHLGKVALITGGSAGIGGQIGRLLALSGARVMLAARDRHKLEQMQAMIQSELAEVGYTDVEDRVHIAPGCDVSSEAQLADLVERTLSAFGTVDYLINNAGIAGVEEMVIDMPVEGWRHTLFANLISNYSLMRKLAPLMKKQGSGYILNVSSYFGGEKDAAIPYPNRADYAVSKAGQRAMAEVFARFLGPEIQINAIAPGPVEGDRLRGTGERPGLFARRARLILENKRLNELHAALIAAARTDERSMHELVELLLPNDVAALEQNPAAPTALRELARRFRSEGDPAASSSSALLNRSIAAKLLARLHNGGYVLPADIFANLPNPPDPFFTRAQIDREARKVRDGIMGMLYLQRMPTEFDVAMATVYYLADRNVSGETFHPSGGLRYERTPTGGELFGLPSPERLAELVGSTVYLIGEHLTEHLNLLARAYLERYGARQVVMIVETETGAETMRRLLHDHVEAGRLMTIVAGDQIEAAIDQAITRYGRPGPVVCTPFRPLPTVPLVGRKDSDWSTVLSEAEFAELCEHQLTHHFRVARKIALSDGASLALVTPETTATSTTEQFALANFIKTTLHAFTATIGVESERTAQRILINQVDLTRRARAEEPRDPHERQQELERFIEAVLLVTAPLPPEADTRYAGRIHRGRAITV

SEQ ID NO: 43 - protein, 1219 aa, Chloroflexus aggregans
MSVTGRLAGKIALITGGAGNIGSEMTRRFLAEGATVIISGRNSAKLAALAERLRSEAGVPAKRIDLEVMDGSDPAAVRAGVAAIIGRHGHIDILVNNAGSTGAQRRLAEIPLNETDRDLDDEEALSTSVANLLGMAWHLMRILSPHMPPGSAIINISTIFSRAEYYGRIPYVVPKAALNTLTQIAARELGIRGIRVNTIFPGPIESERIQTVFQRMDQLKGRPEGDTASQFLATMRLYRANDQGQLERRFPTICDVADAAVFLASDEAAALTGETIEVTHGMELPTSSETSLLARTDLRTIDANGRTTLICAGDQIEEVMALTGMLRTCGSEVIIGFRSEAALAQFEQAIGESRRLAGESFIPPIALPIDLRNPSTIDALFDWAGENTGGIHAAVILPASGREPATQVIDIDDAHVQAFLNDEIVGSIIIASRLARYWQAQRIAPGARAREPRVIFLSNGASTAGNPYGRIQSAAIEQLIRVWRHEAALDYERATAAGERVLPAVWASQIVRFANRSLEGLEFACAWTAQLLHSQRRINEITLTIPADISATTGARSASVGWAESLIGLHLGKVALITGGSAGIGGQIGRLLALSGARVMLAARDPHKLEQIQATIRAELAEVGYTDVEERVQIAPGCDVSSEEQLVDLVERTLAAFGTVDYLINNAGIAGVEEMVIDMPVEGWRNTLYANLISNYSLMRKLAPLMKKQGSGYVLNVSSYFGGEKDAAIPYPNRADYAVSKAGQRAMAEVFARFLGPEIQINAIAPGPVEGDRLRGTGERPGLFARRARLILENKRLNELHAALITAARTDNRPMRELVELLLPNDVAALAQHPAAPDVLRTLAKRFQSEGDPAASSSSFLLNRSIAAKLLARLINGGYDLPADIFANLAVPPDPFFTRAQIDREARKVRDGIMGMLYLQRMPTEFDVAMATVYYLADRNVSGETFHPSGGLRYERTPTGGELFGLPAPERLAELVGSTVYLIGEHLTEHLNLLARAYLERYGARQVVMIVETEAGAEKMRHLLHDHVEAGRLPIIVAGDQIEAAIDQAIANYGRPGPVVCTPFRPLPSAPLVGRKDSDWSTVLSEAEFAELCEHQLTHHFRVARKIALSDGASLALVTPETTATSSTEQFALANFVKTTLHAFTATIGVESERTAQRILINQVDLTRRARAEEPRDPRERQQELERFIEAVLLVTAPLPPEADTRYAGRIHRGRAITV

SEQ ID NO: 44 - protein, 1229 aa, Roseiflexus castenholzii
MSTVRRLEGKVALITGGAGNIGEVITRRFLAEGATVVITGRNAEKLAVYRRRLIDEERVAPERVVALRMDGSDIAQVRAGVAQIVHGGTDVPIPLHRIDILVNNAGSAGPRRRLVDIPLEPSEVQPPDSETLAQAVGNLVGITWNLTRAAAPHMPSGSSVINISTIFSRTDYYGRIAYVAPKAALNALSDGLARELGVRGIRVNTIYPGPIESERIYTMFQAMDALKGQPEGDTASGFLRMMRLSRIDQNGEVVKRFPSPVDVANTAVFLASDESAAFTGHAFEVTHGMEVPTESRTTFVSRPGLRSVDATGKVILICAGDQVDDAVALADTLRSCRATVVIGFRDPRALEKASVLLREPRHALAADMYGRPTMTAEARLVRLDPLDPRAAAQTLEQIHAELGAIHHAVVLPGQSRHAPSASLIEVDDQVVERFLHQELVGTIALARELARFWEEYPSGSSMHRVLFVSNPDDQQGNQYSHILRAAVEQLVRVWRHESEYDSVNPAHQQEGQSSAAVWANQLIRYVNNEMANLDFTCAWVAKLLGSDRRIAEINLYLPEEIVGTIGVHNPGFGWAESLFGLHMGKVALITGGSAGIGGQIGRLLALSGAHVMLAARNADQLEQMRASIVREVRDASYPDAESRVAIFPGSDVSDIDGLERLVNHTVRVFGKVDYLINNAGIAGAEEMVIDMPVDAWRHTLRANLISNYALLRRLAPQMKAAGGAYVLNVSSYFGGEKYVAIPYPNRSDYAVSKAGQRAMVESLARFLGPEIQINAIAPGPVEGERLKGAGSRPGLFMRRARLILENKRLNEVFAALLAARHEGATIADLLPDLFANDIQSIANSAAMPAPLRRLATMLRETSDAGGSAQSYLMNATIARKLLNRLENGGYITLHDRRALTVEPPEPFFTEAQIEREAIKVRDGILGMLHLQRMPTEFDVALATVFYLADRNVTGETFHPSGGLRFERTVTEGELFGKPGQQRLERLKGSVVYLIGEHLRQHLVLLARTFLDEIHVARVVLLTETTQAATDLAAELSDYEAAGRFVVIPTCGDIEGGIDRAMAEYGRPGPVISTPFRPLPDRALSARNGDWSSVLTTAEFEELVEQQITHHFRVARKAGLIEGANVTLVTPPTSARSTSEEFALANFVKTTLHALTATAGAESERTVPHVPVNQVDLTRRARSEEPRTPSEEEEELQRFVNAVLLTSAPLPTPLESRYRARIYRGNAITV

SEQ ID NO: 45 - protein, 1232 aa, Roseiflexus sp.
MSTTRRHDRLEGKVALITGGAGNIGEVITRRFLAEGATVVITGRNVEKLAAYRRRLIDEERIAPDRVVALRMDGSDMAQVRAAIAQIVHGGADVPTPLKRIDILVNNAGSAGPRRRLVDIPLEPSEVHPPDTETLAQAVGNLVGVAWNLTRAAAPYMPPGSSIINVSTIFSRTDYYGRIAYVVPKAALNALSQGLARELGVRGIRVNTIYPGPIESERIHTVFQAMDALKGQPEGETARSFLRLMRLSRADTQGEVTKRFPLPVDVANTAVFLASEESAAFTGHAFEVTHGMEAPVESRTTFVSRPGLRSVDATGNVILICAGDQVDDAIALSDTLRSCRATVVVGFRDVQALEKASALLREPRHVAPADMYGRPTMVAETRLVHLDPLDSRAAAQTLERIRAELGTLHHAVILPASLRHAPTESLIDVDDRIIDRFLEQELVGAIALARELARFWEEHPAGSRAHRVLFVSNPDDQQGNRYADILRAAVEQLARVWRHESEYDAANPAHRHEDQPGAAVWANQLIRYVNSESANLDFTCAWVAKLLGSDRRIAEINLYLPEQIVSTIGVHNPGFGWAESLFGLHMGKVALITGGSAGIGAQIGRLLALSGAHVMLAARNAEQLEQMRALIVREVRDASYPDAESRVAIFPNSDVSDIDGLERLVNHTLRVFGKVDYLINNAGIAGAEEMVIDMPVDAWRHTLRANLISNYALLRRLAPQMKAAGGAYVLNVSSYFGGEKYVAIPYPNRADYAVSKAGQRAMVESLARFLGPEIQINAIAPGPVEGERLKGAANRPGLFMRRARLILENKRLNEVFAALLAARHEGAVIAALLPDLFVNDLQTIADNPAMPAPVRRLATMLRETTDAGGSAQSYLMNATIARKLLNRLENGGYITAGDRRALTNEPPDPFFTEAQIEREAIKVRDGILGMLHLQRMPTEFDVALATVFYLADRNVTGETFHPSGGLRFERTVTEGELFGKPGRQRLERMAGSVVYLIGEHLRQHLLLLARTFLDEIHVARVVLLTETEQAAAELATVFADEEAAGRFVIIPTGGDIEGGIDRAMAEYGRPGPVISTPFRPLPSRALSAQNGDWSNVLTTPEFEELVEQHITHHFRVVRKAGLIEGANVTLVTPPTSARSTAEEFALANFIKTTLHALTATAGAESERTMPHVPVNQVDLTRRARSEEPRTPAEEEEELQRFVNAVLLTSAPLPTPLESRYRARIYRGNAITV

SEQ ID NO: 46 - protein, 1217 aa, Erythrobacter sp.
MSKEGNAAKGRLEGKVALITGAAGNLGNEISRAFAREGAFVVMTGRTEERISAAREQLIADTGVAPERIDTAVLDGGNPDSIRAAMAKLRKEYGRIDILINNAGSAGPKQPLHNVPLSPQEMEACGDTETVRDAMLNILGVTWNMARIVAPMMPVGGAMVNISTIFSHTRYYGRTAYVVPKAALNALSNQLASELGPRGIRVNTVFPGPIESDRIRTVFAAMDEVQSQPKDTTANYFTGRMALTRSVNGKVDGKPLPNPKDIAGTCLFLASEEAAGIAGEEVDVTHGLSANRTSASTYMTRPSMRSLDGAGLNIFIVSGENWDDALVAAHTLIGSGAKVRLGLARNADVAQANARLKAQGIGEELTVTRFNRAEPDAMEDALAAFSGDVDGAITGAIILPVKPSGHFTGSLLAADDDTVTKFMDTELVGAIAVSRSLARYWHGREDLQSPPRCVFMTNPGDPLGNSFASVLSAGITQLIRIWRDEERVQAGNGSTEHAVWSNQIVRHTNTEDENTRFASGHATRVLFREQHIAEIDLKLPANISEETGSRKAMVGFAENITGLHLGKVAFITGGSAGIGGQVARLLALAGAKVMMVARRESELVAARDRIVGELQDIGFAGVERRVKYMADIDVSDFASLDKAVDATLEEFGRIDYLINNAGVAGAEDMVIDMEPEAWRFTLDANLISNYHLMQRVVPLMKEQGSGYVLNVSSYFGGEKFLAVAYPNRADYGLSKAGQRAMVEAFSPFLGPEVQCNAIAPGPVDGDRLSGTGGKPGLFQRRAKLILENKRLNAVYSAVIHAIREGGDAAKILTRLSRNSTSTLSHDAEAPEELRKLALDFASQGDGLCTWDQYLLTDAMAQRLLVRLQLGGFLLGSNEWASLSSSEQTWLKLSPPDDKPFLPAAQVDKVANGVGKGVISQLHLGAMPTEAEVAQATVFFLADRAVSGETFMPSGGLRVERSNTEREMFGSPKQERIDKMKGKTVWIIGEHLSDYVAATIEELVSGCGVAKVVLIAKDKSGEKAVRDQLPNDLSKDALEVLIAGDGLEEAMDEALGHWGKPTTVLSMPGEPLPDHLFEGGNPLSTKDFAHMVEANITRHYRVTRKASLYDGCQVVLVSPDVPYGSDGPGVALANFVKTSLHAFTATVAVENERLVHDVPVNQINLTRRVSSEEPRDADEHAEELRRFTRAVLLVGAPLPDAQDSRYRSKIYRGTSMTV

SEQ ID NO: 47 - protein, 1210 aa, Unknown
  Description of Unknown: Gamma proteobacterium NOR51-B polypeptide
MNTETRTTSGGRLHDKVVILTGAAGNIGSYISRSLLREGANLVMTGRNEPKLQAFVEGLVEEGFDRDNILIAIGDSAKADICREIVKATVNHFGNIDVLVNNAGGAGPRRTLRDIPFSESERLARGDDETMLDAAMNLLAGAWNMTRAAVPHMSEGGSIVNVSTIFSRTHYYGRIPYVVPKSGLNALSIGLAKELGEEHGIRVNTLFPGPIESERIDTVFGNMDALQSAPAGATSQEFRDLMITRRENPDGEYEYRYPTPNDVASTVTWLASEESAALSGHHIEVTNGMQVPAQSRSKLVSWPDKRLEDLSGQVVFLLAGSDYEDALAFAERHMVSGAKVVLAFRSLESLGLARSLCASRDLESIHLLHLEPLRRESADRCFDYIRDHFGRLDGIVVLPRSGNGEHGYSLSTAGDDDVEAFVRDEIISPVAFAAALAINLDRWGILEEAPALTYVTNPTDGHGDYLNEVKRAAIEALIRIWRHEDRQMRKKGEREWAMLPNQLVRYDNNEEDNLTFTADWAATLTNRVRRMDPINLWVPESIMRATGKSGMPQSIQRVLPGLHKGRTAVITGGSLGIGLQLGRFLAIAGARVLLSARSKEKLEEARHEIVEELRGVGYPNAHQRVHILPDIDVGDEEALERLYNHSIELFGNVDFLINNAGISGAEEMVVDMSLEAWNRTMYANLISNYSLIRKYAPKMKANGYGVVLNVSSYFGGEKYVAVAYPNRADYAVSKAGQRVLAEILSRHLGPEIRINALAPGPVDGARLRGLGGAPGLFERRGRLVLENKRLNSVHKAVLAALREGATPEVIMALSRNALGDAKPTAGQSKALDKLFAQVEDSPEGGNSTAFLLNRDLAEKLMNRLVTGGLFTPESATQFMEGFVDAPAIFFDEKSVNKAAAGIEAGILNRLHLHKMPTDEQIGLSTVFHLADDIASGETFHPSGGLKFDRSVTEGELLLPPDRDSLAKLKGKRVVLIGDSMREELSAIGNGFINQGVASLTVLTRSPEACEEVQHSLQKSNSVTLDVRCIEDNIEDALDDLLQNQGGFDVVVSAPFSRLPYNPLAAEREGSWNRVLSHTDFARLIDEQLTHHFRVARRAALVPNCQIVLLTPDTSFVSSREEFALALFVKNSLHAFTVTLGVETERLPTVPAVNQVQLTRRARAEEPATESELQEEMERLVSAVLQCAVPAPSPSESRYLARIFRGNAVTV

SEQ ID NO: 48 - protein, 1214 aa, Unknown
  Description of Unknown: Gamma proteobacterium NOR5-3 polypeptide
MNNQNTTQTHSTSGARLDNKVVILTGAAGNIGAFVSRNLLREGAKLVMTGRNEPKLKSFVEELVGEGFDREKILIAIGDSAKADVCRRIVASAVEQFGKIDVLVNNAGGAGPRRTLREIPFSESERLARGDDETMFDAAMNLLAGPWNMTRAAVPHMVRGGSIVNVSTIFSRTHYYGRIPYVVPKSGLNALSIGLAKELGEEHGIRVNTLFPGPIESERIDTVFGNMDALQSAPAGTTSQEFRDLMITRRENPEGEFEYRYPTPNDVASTVTWLACGESAALSGHHIEVTNGMQVPAQSRSKLVSWPDKRLEDLSGQVVFVLAGSDYEDALAFSERHIVSGAKVVLAFRSLESLGYARSLIASRGLDSIHLLHLEPLRRESADRCFDYIRDHFGRLDGIVVLPRSGNGQHGYSLSTAGDDDVEAFVRDEIVSPVAFAAQLAINLDRWGMLDEAPALTYVTNPTDGHGDYLNEVKRAAIEALIRIWRHEDRQMRKKGERQWAMLPNQLVRYDNDEEDNLTFTADWAATLTNRVRRMDPINLWVPESIKRATGKGSMPQSIQRVLPGLHKGRTAVITGGSLGIGLQLGRFLAIAGARVLLSARSKEKLEEARNGIVEELRAVGYPNAHQRVHILPDIDVGDEEALVRLYDHSIELFGHVDFLINNAGISGAEEMVVDMTLEAWNRTMYANLISNYSLIRKYAPKMKANGYGIVLNVSSYFGGEKYVAVAYPNRADYAVSKAGQRVLAEILSRHLGPEIRINALAPGPVDGARLRGLGGAPGLFERRGRLVLENKRLNFVHKAILAAIDEKVSDESILALAKNALSEMKRVAGQSKALGKLCAQVEDSREGGNSAAYLLNKDLADKLLKRLVTGGLFKPESAEAFMEAFVDAPTPFFDEKAVKKAADGIEAGILNRLHLHKMPTDEQIGLSTVFHLADDIASGETFHPSGGLKFDRSVTEGELLLPPDRESLARLGGKRVVLIGDAMREEMSAIGNGFIEREVASLTVLTRTAEAQEEILHSLPGTGKTKVDVRVIGDNLEDALDDLVQNQGGFDVVVSAPFSRLPYNPLAAEREGSWERVLSHTDFAKLVDEQLTQHFRVARRAALVPNCQIVLLTPDTSFVSSREEFALALFVKNSLHAFTVTLGVETERLPTVPAVNQVQLTRRARTEEPASESELEEELERLVYAVLQCAVPAPSPTESRYLARIFRGNAVTV

SEQ ID NO: 49 - protein, 1216 aa, Unknown
  Description of Unknown: Marine gamma proteobacterium HTCC2080 polypeptide
MNDFVQFTDDMTSQSKSGKRLDNKSIILTGAAGSIGRFITRQLLCEGARVMMTGRDISKLEEFVDSLCDDGFDRENMVVTVGDCADPEVCRRIVADTVEAFGTIDVLVNNAGAAGPKYTLRDIPFSDVEMKTAGSDQTMFDSAMNLLGAPWNMARAAAPHMSVGASIINVSTIFSRTHYFGRIPYVVPKSGLNALSKGLALELGEEQGIRVNTVFPGPIESERIDTVFARMDELQNLEPGSTGREFRDLMITTREGEEGLEYRYPTPTDVASSITWLASGESAAVSGHAVEVTNGMQVPAQSRSQLVSWPDKRLEDLSDHIVLILGGSDYEEAVTFAERHTESGARVLLAFRNLESVGHARSIIQARELESVQLSHLDPLRRESVDRTMQFIDDHFGRLDGVIVLPQKKNGQYGYSICSATDDDVENFVKDEVVAPVAFASTLATNLSRWFGKCDPPAITYVTNASDGHGNLLNEVIRASNEALIRGWRHEDETLKAAGELSWSVQPNQLVRYDTEDRDALPFAADWAATLTNRVRQMDPINLWIPKDIKRATGKGAMPTSLMRVLPGLHKGKTAVITGGSLGIGLQLGRYLAIAGARVLLSARSEAKLIEAKAEIVAELSGIGYPNADNRIHVLANIDVGDPAALETLHQHAVDLFGQVDFLINNAGISGAEEMVVDMTLKDWDRTMEANLISNYSLIRKFGPLMKDKGRGSILNVSSYFGGEKYVAVAYPNRADYAVSKAGQRVLAEILSRHLGPEIQINALAPGPVDGARLRGLGDAPGLFDRRGRLVLENKRLNQVHAAIISAVADGYPIEEIRKLSANAVEVLPTHNLPSVLSRLYSQVKDSGGTGSSSKCLLHMGMAVKLVERLVNAGIFTTEDKDEFLGSFVDAPSPFFDKEACKRSATQIESGILNRLHLHKMPTDEQVGLSTVFHLADEIVSGETFHPSGGLKFDRSVTEGELLLSPSEKDLARLSGKRVVILGDCMRNEITEIAKGFKSNGVEKLWILTRSEETKTTLYHALECDSVENIDVRCIGDDIEGALDNLLRHDGGFDVVVSSPFERLPLNALAGDRGGDWDRVLSDEQFRQLVHQQLTHHFRSARIAALIPSCQIVLLTPETSLASTREEFALALFVKNSLHAFTVTLGVEGERLPTVPAVNQVQLTRRAHTEEPSNDQELSEEMERLVAAVMQCSVPAPSPKESRYLSKIFRGNAVTV

SEQ ID NO: 50 - protein, 219 aa, Psuedomonas fluorescens
  Carbonic anhydrase P. fluorescens Pf-5
MQNIIDGFLKFQREAFPQRSELFKQLASTQNPGTLFVTCSDSRVVPELLTQQEPGDLFVIRNAGNIVPSYGPEPGGVSATVEYAVAVLGVSDIVICGHSDCGAMTAISTCKCLDHLPAVANWLRHAESAKVINAARQHASPAEHLDALVRDNVIAQLANLKTHPSVALALEQGRLNLHGWVYDIESGAIVALDGNTQRFVSLAEYPHTCALASQASSAA

SEQ ID NO: 51 - protein, 213 aa, Yersinia ruckeri
  Carbonic anhydrase Y. ruckeri ATCC 29473
MQDIIDGFLKFQREVFPQRSELFKRLADTQHPGALFVTCSDSRVVPELLTQREPGELFVIRNAGNIVPSYGPEPGGVSATVEYAVAVLGVTDVVICGHSNCGAMSAIAECQCLDHLPAVAAWLRHADSAKLVNAALPHASPKDRLNSLVRENVIAQLANIKTHPSVALACAQGRLRLHGWVYDIETGSIDVLDELTRTFSPLSAYSVVSKPTE

SEQ ID NO: 52 - protein, 219 aa, Hahella chejuensis
  Carbonic anhydrase Hahella chejuensis KCTC 2396
MKDIIEGFLKFQREAFPERKELFKDLANQQQPRTLFISCSDSRLVPELVTQREPGDLFVIRNAGNIVPPYGPEPGGVSASVEYAVAALRVADIVVCGHSNCGAMTAVATCQCIDHMPAVAHWLRYADSAKVVNQARKHASERAKIEDMVRENVIAQLANLQTHPSVRLALQEGRLTMHGWFYDIESGGIDAYDGSRHAFVPLAEHPEARAIPGKLSHAV

SEQ ID NO: 53 - protein, 219 aa, Burkholderia cenocepacia
  Carbonic anhydrase Burkholderia cenocepacia J23152
MKDIIEGFLKFQRDAYPARAALFRDLARSQNPRALFISCSDSRLVPELVTQREPGDLFVIRNAGNIVPSYGPEPGGVSASVEYAVAALRVTDVVICGHSDCGAMTAIATCQCMDHMPAVGHWLRYADSARVVNEARTHRSERERIDSMVRENVVAQLANLKTHPAVRLALEEGRLALHGWVYDIESGCIDAYDGATGRFVSLADHPGVRATPATLPVAA

SEQ ID NO: 54 - protein, 215 aa, Yersinia frederiksenii
  Carbonic anhydrase Yersinia frederiksenii ATCC 33461
MKEIIDGFLKFQRDAFPERAELFRSLATQQSPKTLFISCSDSRMVPELVTQREPGDLFVIRNAGNIVPSYGPEPGGISASVEYAVTALKVTDIVICGHSDCGAMTAIAKCHCLDHMPAVKHWLQYADSAKVVNESREYKNIHDKTISMVHENVVAQLANIQTHPSVRLALEEGRLTIHGWVYDIESGLISAFDRASRQFVSLAANPNVRAVPAHN

SEQ ID NO: 55 - protein, 219 aa, Pseudomonas entomophila
  Carbonic anhydrase Pseudomonas entomophila L48
MQDIIDGFLKFQRDAFPERVKLFKDLATQQSPRALFISCSDSRLVPELVTQREPGDLFVIRNAGNIVPSYGPEPGGVSASVEYAVAALQVADIVICGHSDCGAMTAIATCKCLDHMPAVAGWLRYADSARVVNEARQHQSPHAKVEAMVRENVIAQLANIQTHPSVRLALEEGRVALHGWIYDIESGRIDAFDGRTGQFVSLADNPEVRAVSHASRHVA

SEQ ID NO: 56 - protein, 219 aa, Pseudomonas putida
  Carbonate dehydratase Pseudomonas putida W619
MKAIIDGFLKFQKNAFPERVKLFKDLANQQAPKALFISCSDSRLVPELVTQREPGDLFVIRNAGNIVPSYGPEPGGVSASVEYAVAGLNVADIVICGHSDCGAMTAIATCKCLDHMPAVAGWLRYADSAKVVNEARHHVDKPSKVASMVRENVIAQLANIQTHPSVRLALEEGRVTLHGWIYDIETGGIDAFDGSTGTFVSLAENPEVHAVSQQARHVA

SEQ ID NO: 57 - protein, 217 aa, Serratia proteamaculans
  Carbonate dehydratase Serratia proteamaculans 568
MKEVIEGFLKFQREAFVERTALFQRLATQQSPRTLFISCSDSRLVPELITQREPGDLFVIRNAGNIVPSFGPEPGGVSASVEYAVSALGVEDIVICGHSDCGAMTAIATCQCLQHMPTVANWLRYADSAKVVNQAYQHASENEKVSSMVRENVIAQLNNIKTHPSVALALEQGRLKLHGWVYDIASGGIEALDGETRRFIPLATNPEVTATPAVSRF

SEQ ID NO: 58 - protein, 211 aa, Erwinia tasmaniensis
  Carbonate dehydratase Erwinia tasmaniensis Et1/99
MQHIVEGFLNFQKDIFPEQKELFRSLASSQNPKALFISCSDSRLVPELVTQQDPGQLFVIRNAGNIVPSFGPEPGGVSATIEYAVVALGVSDIVICGHSNCGAMKAIATCQCLAPMPAVEHWLRYADAAKAVVEKKNYDTEEDKVNAMVQENVIAQLNNIKTHPSVAVGLRNNALRLHGWVYDIESGAIRALDKDSKKFVLLSDNPQVHFE

SEQ ID NO: 59 - protein, 220 aa, Pseudomonas aeruginosa
  Carbonate dehydratase Pseudomonas aeruginosa PA7
MRDIIDGFLRFQRDAYPARSQLFKSLATRQAPKALFIACSDSRVVPELLTQREPGELFVIRNAGNIVPGYGPQPGGVSASVEYAVAVLGVADIVVCGHSDCGAMGAIASCACLDHLPAVAGWLRHAEAARAMNSAHEHSSDAARLDALVRHNVIAQLANLRTHPSVARALEQGRLNLHGWVYDIESGRIDALDGASRRFVSLAEHPGVRAVGGEPGQAVA

SEQ ID NO: 60 - protein, 202 aa, Streptosporangium roseum
  Carbonate dehydratase Streptosporangium roseum DSM 43021
MQDLEEGVARFQRDVFPAKTELFTRLATAHQPATLFISCSDARVVPELITQSEPGELFVIRTAGNLVPAYAPGSADGVAAGIEYAVAVLGVSDIVVCGHSGCGAMTAVADGLDPAALPAVAGWLRHADASRARVTTTETGTGEVAALVRQNVLTQLANLATHPSVAHALAGKTVTLHGWIYDIGTGTVAELDATGRPSALAV

SEQ ID NO: 61 - DNA, 3704 bp, Artificial Sequence
  Description of Artificial Sequence: Synthetic mcr codon optimized polynucleotide from C. aurantiacus
gaattccgctagcaggagctaaggaagctaaaatgtccggtacgggtcgtttggctggtaaaattgcattgatcaccggtggtgctggtaacattggttccgagctgacccgccgttttctggccgagggtgcgacggttattatcagcggccgtaaccgtgcgaagctgaccgcgctggccgagcgcatgcaagccgaggccggcgtgccggccaagcgcattgatttggaggtgatggatggttccgaccctgtggctgtccgtgccggtatcgaggcaatcgtcgctcgccacggtcagattgacattctggttaacaacgcgggctccgccggtgcccaacgtcgcttggcggaaattccgctgacggaggcagaattgggtccgggtgcggaggagactttgcacgcttcgatcgcgaatctgttgggcatgggttggcacctgatgcgtattgcggctccgcacatgccagttggctccgcagttatcaacgtttcgactattttctcgcgcgcagagtactatggtcgcattccgtacgttaccccgaaggcagcgctgaacgctttgtcccagctggctgcccgcgagctgggcgctcgtggcatccgcgttaacactattttcccaggtcctattgagtccgaccgcatccgtaccgtgtttcaacgtatggatcaactgaagggtcgcccggagggcgacaccgcccatcactttttgaacaccatgcgcctgtgccgcgcaaacgaccaaggcgctttggaacgccgctttccgtccgttggcgatgttgctgatgcggctgtgtttctggcttctgctgagagcgcggcactgtcgggtgagacgattgaggtcacccacggtatggaactgccggcgtgtagcgaaacctccttgttggcgcgtaccgatctgcgtaccatcgacgcgagcggtcgcactaccctgatttgcgctggcgatcaaattgaagaagttatggccctgacgggcatgctgcgtacgtgcggtagcgaagtgattatcggcttccgttctgcggctgccctggcgcaatttgagcaggcagtgaatgaatctcgccgtctggcaggtgcggatttcaccccgccgatcgctttgccgttggacccacgtgacccggccaccattgatgcggttttcgattggggcgcaggcgagaatacgggtggcatccatgcggcggtcattctgccggcaacctcccacgaaccggctccgtgcgtgattgaagtcgatgacgaacgcgtcctgaatttcctggccgatgaaattaccggcaccatcgttattgcgagccgtttggcgcgctattggcaatcccaacgcctgaccccgggtgcccgtgcccgcggtccgcgtgttatctttctgagcaacggtgccgatcaaaatggtaatgtttacggtcgtattcaatctgcggcgatcggtcaattgattcgcgtttggcgtcacgaggcggagttggactatcaacgtgcatccgccgcaggcgatcacgttctgccgccggtttgggcgaaccagattgtccgtttcgctaaccgctccctggaaggtctggagttcgcgtgcgcgtggaccgcacagctgctgcacagccaacgtcatattaacgaaattacgctgaacattccagccaatattagcgcgaccacgggcgcacgttccgccagcgtcggctgggccgagtccttgattggtctgcacctgggcaaggtggctctgattaccggtggttcggcgggcatcggtggtcaaatcggtcgtctgctggccttgtctggcgcgcgtgtgatgctggccgctcgcgatcgccataaattggaacagatgcaagccatgattcaaagcgaattggcggaggttggttataccgatgtggaggaccgtgtgcacatcgctccgggttgcgatgtgagcagcgaggcgcagctggcagatctggtggaacgtacgctgtccgcattcggtaccgtggattatttgattaataacgccggtattgcgggcgtggaggagatggtgatcgacatgccggtggaaggctggcgtcacaccctgtttgccaacctgatttcgaattattcgctgatgcgcaagttggcgccgctgatgaagaagcaaggtagcggttacatcctgaacgtttcttcctattttggcggtgagaaggacgcggcgattccttatccgaaccgcgccgactacgccgtctccaaggctggccaacgcgcgatggcggaagtgttcgctcgtttcctgggtccagagattcagatcaatgctattgccccaggtccggttgaaggcgaccgcctgcgtggtaccggtgagcgtccgggcctgtttgctcgtcgcgcccgtctgatcttggagaataaacgcctgaacgaattgcacgcggctttgattgctgcggcccgcaccgatgagcgctcgatgcacgagttggttgaattgttgctgccgaacgacgtggccgcgttggagcagaacccagcggcccctaccgcgctgcgtgagctggcacgccgcttccgtagcgaaggtgatccggcggcaagctcctcgtccgccttgctgaatcgctccatcgctgccaagctgttggctcgcttgcataacggtggctatgtgctgccggcggatatttttgcaaatctgcctaatccgccggacccgttctttacccgtgcgcaaattgaccgcgaagctcgcaaggtgcgtgatggtattatgggtatgctgtatctgcagcgtatgccaaccgagtttgacgtcgctatggcaaccgtgtactatctggccgatcgtaacgtgagcggcgaaactttccatccgtctggtggtttgcgctacgagcgtaccccgaccggtggcgagctgttcggcctgccatcgccggaacgtctggcggagctggttggtagcacggtgtacctgatcggtgaacacctgaccgagcacctgaacctgctggctcgtgcctatttggagcgctacggtgcccgtcaagtggtgatgattgttgagacggaaaccggtgcggaaaccatgcgtcgtctgttgcatgatcacgtcgaggcaggtcgcctgatgactattgtggcaggtgatcagattgaggcagcgattgaccaagcgatcacgcgctatggccgtccgggtccggtggtgtgcactccattccgtccactgccaaccgttccgctggtcggtcgtaaagactccgattggagcaccgttttgagcgaggcggaatttgcggaactgtgtgagcatcagctgacccaccatttccgtgttgctcgtaagatcgccttgtcggatggcgcgtcgctggcgttggttaccccggaaacgactgcgactagcaccacggagcaatttgctctggcgaacttcatcaagaccaccctgcacgcgttcaccgcgaccatcggtgttgagtcggagcgcaccgcgcaacgtattctgattaaccaggttgatctgacgcgccgcgcccgtgcggaagagccgcgtgacccgcacgagcgtcagcaggaattggaacgcttcattgaagccgttctgctggttaccgctccgctgcctcctgaggcagacacgcgctacgcaggccgtattcaccgcggtcgtgcgattaccgtctaatagaagctt

SEQ ID NO: 62 - DNA, 4911 bp, Artificial Sequence
  Description of Artificial Sequence: Synthetic pJ206 plasmid polynucleotide
ggtggcggtacttgggtcgatatcaaagtgcatcacttcttcccgtatgcccaactttgtatagagagccactgcgggatcgtcaccgtaatctgcttgcacgtagatcacataagcaccaagcgcgttggcctcatgcttgaggagattgatgagcgcggtggcaatgccctgcctccggtgctcgccggagactgcgagatcatagatatagatctcactacgcggctgctcaaacttgggcagaacgtaagccgcgagagcgccaacaaccgcttcttggtcgaaggcagcaagcgcgatgaatgtcttactacggagcaagttcccgaggtaatcggagtccggctgatgttgggagtaggtggctacgtcaccgaactcacgaccgaaaagatcaagagcagcccgcatggatttgacttggtcagggccgagcctacatgtgcgaatgatgcccatacttgagccacctaactttgttttagggcgactgccctgctgcgtaacatcgttgctgctccataacatcaaacatcgacccacggcgtaacgcgcttgctgcttggatgcccgaggcatagactgtacaaaaaaacagtcataacaagccatgaaaaccgccactgcgccgttaccaccgctgcgttcggtcaaggttctggaccagttgcgtgagcgcatttttttttcctcctcggcgtttacgccccgccctgccactcatcgcagtactgttgtaattcattaagcattctgccgacatggaagccatcacagacggcatgatgaacctgaatcgccagcggcatcagcaccttgtcgccttgcgtataatatttgcccatagtgaaaacgggggcgaagaagttgtccatattggccacgtttaaatcaaaactggtgaaactcacccagggattggcgctgacgaaaaacatattctcaataaaccctttagggaaataggccaggttttcaccgtaacacgccacatcttgcgaatatatgtgtagaaactgccggaaatcgtcgtggtattcactccagagcgatgaaaacgtttcagtttgctcatggaaaacggtgtaacaagggtgaacactatcccatatcaccagctcaccgtctttcattgccatacggaactccggatgagcattcatcaggcgggcaagaatgtgaataaaggccggataaaacttgtgcttatttttctttacggtctttaaaaaggccgtaatatccagctgaacggtctggttataggtacattgagcaactgactgaaatgcctcaaaatgttctttacgatgccattgggatatatcaacggtggtatatccagtgatttttttctccatttttttttcctcctttagaaaaactcatcgagcatcaaatgaaactgcaatttattcatatcaggattatcaataccatatttttgaaaaagccgtttctgtaatgaaggagaaaactcaccgaggcagttccataggatggcaagatcctggtatcggtctgcgattccgactcgtccaacatcaatacaacctattaatttcccctcgtcaaaaataaggttatcaagtgagaaatcaccatgagtgacgactgaatccggtgagaatggcaaaagtttatgcatttctttccagacttgttcaacaggccagccattacgctcgtcatcaaaatcactcgcatcaaccaaaccgttattcattcgtgattgcgcctgagcgaggcgaaatacgcgatcgctgttaaaaggacaattacaaacaggaatcgagtgcaaccggcgcaggaacactgccagcgcatcaacaatattttcacctgaatcaggatattcttctaatacctggaacgctgtttttccggggatcgcagtggtgagtaaccatgcatcatcaggagtacggataaaatgcttgatggtcggaagtggcataaattccgtcagccagtttagtctgaccatctcatctgtaacatcattggcaacgctacctttgccatgtttcagaaacaactctggcgcatcgggcttcccatacaagcgatagattgtcgcacctgattgcccgacattatcgcgagcccatttatacccatataaatcagcatccatgttggaatttaatcgcggcctcgacgtttcccgttgaatatggctcatttttttttcctcctttaccaatgcttaatcagtgaggcacctatctcagcgatctgtctatttcgttcatccatagttgcctgactccccgtcgtgtagataactacgatacgggagggcttaccatctggccccagcgctgcgatgataccgcgagaaccacgctcaccggctccggatttatcagcaataaaccagccagccggaagggccgagcgcagaagtggtcctgcaactttatccgcctccatccagtctattaattgttgccgggaagctagagtaagtagttcgccagttaatagtttgcgcaacgttgttgccatcgctacaggcatcgtggtgtcacgctcgtcgtttggtatggcttcattcagctccggttcccaacgatcaaggcgagttacatgatcccccatgttgtgcaaaaaagcggttagctccttcggtcctccgatcgttgtcagaagtaagttggccgcagtgttatcactcatggttatggcagcactgcataattctcttactgtcatgccatccgtaagatgcttttctgtgactggtgagtactcaaccaagtcattctgagaatagtgtatgcggcgaccgagttgctcttgcccggcgtcaatacgggataataccgcgccacatagcagaactttaaaagtgctcatcattggaaaacgttcttcggggcgaaaactctcaaggatcttaccgctgttgagatccagttcgatgtaacccactcgtgcacccaactgatcttcagcatcttttactttcaccagcgtttctgggtgagcaaaaacaggaaggcaaaatgccgcaaaaaagggaataagggcgacacggaaatgttgaatactcatattcttcctttttcaatattattgaagcatttatcagggttattgtctcatgagcggatacatatttgaatgtatttagaaaaataaacaaataggggtcagtgttacaaccaattaaccaattctgaacattatcgcgagcccatttatacctgaatatggctcataacaccccttgtttgcctggcggcagtagcgcggtggtcccacctgaccccatgccgaactcagaagtgaaacgccgtagcgccgatggtagtgtggggactccccatgcgagagtagggaactgccaggcatcaaataaaacgaaaggctcagtcgaaagactgggcctttcgcccgggctaattgaggggtgtcgcccttgtcgctgagatatcgatatccgtcaaaagggcgacacaaaatttattctaaatgcataataaatactgataacatcttatagtttgtattatattttgtattatcgttgacatgtataattttgatatcaaaaactgattttccctttattattttcgagatttattttcttaattctctttaacaaactagaaatattgtatatacaaaaaatcataaataatagatgaatagtttaattataggtgttcatcaatcgaaaaagcaacgtatcttatttaaagtgcgttgcttttttctcatttataaggttaaataattctcatatatcaagcaaagtgacaggcgcccttaaatattctgacaaatgctctttccctaaactccccccataaaaaaacccgccgaagcgggtttttacgttatttgcggattaacgattactcgttatcagaaccgcccagggggcccgagcttaagactggccgtcgttttacaacacagaaagagtttgtagaaacgcaaaaaggccatccgtcaggggccttctgcttagtttgatgcctggcagttccctactctcgccttccgcttcctcgctcactgactcgctgcgctcggtcgttcggctgcggcgagcggtatcagctcactcaaaggcggtaatacggttatccacagaatcaggggataacgcaggaaagaacatgtgagcaaaaggccagcaaaaggccaggaaccgtaaaaaggccgcgttgctggcgtttttccataggctccgcccccctgacgagcatcacaaaaatcgacgctcaagtcagaggtggcgaaacccgacaggactataaagataccaggcgtttccccctggaagctccctcgtgcgctctcctgttccgaccctgccgcttaccggatacctgtccgcctttctcccttcgggaagcgtggcgctttctcatagctcacgctgtaggtatctcagttcggtgtaggtcgttcgctccaagctgggctgtgtgcacgaaccccccgttcagcccgaccgctgcgccttatccggtaactatcgtcttgagtccaacccggtaagacacgacttatcgccactggcagcagccactggtaacaggattagcagagcgaggtatgtaggcggtgctacagagttcttgaagtggtgggctaactacggctacactagaagaacagtatttggtatctgcgctctgctgaagccagttaccttcggaaaaagagttggtagctcttgatccggcaaacaaaccaccgctggtagcggtggtttttttgtttgcaagcagcagattacgcgcagaaaaaaaggatctcaagaagatcctttgatcttttctacggggtctgacgctcagtggaacgacgcgcgcgtaactcacgttaagggattttggtcatgagcttgcgccgtcccgtcaagtcagcgtaatgctctgctta

SEQ ID NO: 63 - DNA, 298 bp, Artificial Sequence
  Description of Artificial Sequence: Synthetic P(talA) promoter polynucleotide based on E. coli
ggtcatccatttggttgttcctttcacgtaacgttcacaaataaagtgtgtgggcaacagcccctgcccacaacgtggcgcacattattaccctgccggagtctacagactttgagcaagtccaaactctcaccattaatataatgttttggtaataatcctataacactgatgttacctgcttaatccagcaataccatgcctgtctgctatgcttttttgatgcgtttagcgaaatttctcagaagtgtgaattaacgcactcatctaacactttacttttcaaggagtatttccc

SEQ ID NO: 64 - DNA, 5794 bp, Artificial Sequence
  Description of Artificial Sequence: Synthetic plasmid pSMART(HC)Amp-PtalA-mcr polynucleotide
ggtcatccatttggttgttcctttcacgtaacgttcacaaataaagtgtgtgggcaacagcccctgcccacaacgtggcgcacattattaccctgccggagtctacagactttgagcaagtccaaactctcaccattaatataatgttttggtaataatcctataacactgatgttacctgcttaatccagcaataccatgcctgtctgctatgcttttttgatgcgtttagcgaaatttctcagaagtgtgaattaacgcactcatctaacactttacttttcaaggagtatttcccatggccggtacgggtcgtttggctggtaaaattgcattgatcaccggtggtgctggtaacattggttccgagctgacccgccgttttctggccgagggtgcgacggttattatcagcggccgtaaccgtgcgaagctgaccgcgctggccgagcgcatgcaagccgaggccggcgtgccggccaagcgcattgatttggaggtgatggatggttccgaccctgtggctgtccgtgccggtatcgaggcaatcgtcgctcgccacggtcagattgacattctggttaacaacgcgggctccgccggtgcccaacgtcgcttggcggaaattccgctgacggaggcagaattgggtccgggtgcggaggagactttgcacgcttcgatcgcgaatctgttgggcatgggttggcacctgatgcgtattgcggctccgcacatgccagttggctccgcagttatcaacgtttcgactattttctcgcgcgcagagtactatggtcgcattccgtacgttaccccgaaggcagcgctgaacgctttgtcccagctggctgcccgcgagctgggcgctcgtggcatccgcgttaacactattttcccaggtcctattgagtccgaccgcatccgtaccgtgtttcaacgtatggatcaactgaagggtcgcccggagggcgacaccgcccatcactttttgaacaccatgcgcctgtgccgcgcaaacgaccaaggcgctttggaacgccgctttccgtccgttggcgatgttgctgatgcggctgtgtttctggcttctgctgagagcgcggcactgtcgggtgagacgattgaggtcacccacggtatggaactgccggcgtgtagcgaaacctccttgttggcgcgtaccgatctgcgtaccatcgacgcgagcggtcgcactaccctgatttgcgctggcgatcaaattgaagaagttatggccctgacgggcatgctgcgtacgtgcggtagcgaagtgattatcggcttccgttctgcggctgccctggcgcaatttgagcaggcagtgaatgaatctcgccgtctggcaggtgcggatttcaccccgccgatcgctttgccgttggacccacgtgacccggccaccattgatgcggttttcgattggggcgcaggcgagaatacgggtggcatccatgcggcggtcattctgccggcaacctcccacgaaccggctccgtgcgtgattgaagtcgatgacgaacgcgtcctgaatttcctggccgatgaaattaccggcaccatcgttattgcgagccgtttggcgcgctattggcaatcccaacgcctgaccccgggtgcccgtgcccgcggtccgcgtgttatctttctgagcaacggtgccgatcaaaatggtaatgtttacggtcgtattcaatctgcggcgatcggtcaattgattcgcgtttggcgtcacgaggcggagttggactatcaacgtgcatccgccgcaggcgatcacgttctgccgccggtttgggcgaaccagattgtccgtttcgctaaccgctccctggaaggtctggagttcgcgtgcgcgtggaccgcacagctgctgcacagccaacgtcatattaacgaaattacgctgaacattccagccaatattagcgcgaccacgggcgcacgttccgccagcgtcggctgggccgagtccttgattggtctgcacctgggcaaggtggctctgattaccggtggttcggcgggcatcggtggtcaaatcggtcgtctgctggccttgtctggcgcgcgtgtgatgctggccgctcgcgatcgccataaattggaacagatgcaagccatgattcaaagcgaattggcggaggttggttataccgatgtggaggaccgtgtgcacatcgctccgggttgcgatgtgagcagcgaggcgcagctggcagatctggtggaacgtacgctgtccgcattcggtaccgtggattatttgattaataacgccggtattgcgggcgtggaggagatggtgatcgacatgccggtggaaggctggcgtcacaccctgtttgccaacctgatttcgaattattcgctgatgcgcaagttggcgccgctgatgaagaagcaaggtagcggttacatcctgaacgtttcttcctattttggcggtgagaaggacgcggcgattccttatccgaaccgcgccgactacgccgtctccaaggctggccaacgcgcgatggcggaagtgttcgctcgtttcctgggtccagagattcagatcaatgctattgccccaggtccggttgaaggcgaccgcctgcgtggtaccggtgagcgtccgggcctgtttgctcgtcgcgcccgtctgatcttggagaataaacgcctgaacgaattgcacgcggctttgattgctgcggcccgcaccgatgagcgctcgatgcacgagttggttgaattgttgctgccgaacgacgtggccgcgttggagcagaacccagcggcccctaccgcgctgcgtgagctggcacgccgcttccgtagcgaaggtgatccggcggcaagctcctcgtccgccttgctgaatcgctccatcgctgccaagctgttggctcgcttgcataacggtggctatgtgctgccggcggatatttttgcaaatctgcctaatccgccggacccgttctttacccgtgcgcaaattgaccgcgaagctcgcaaggtgcgtgatggtattatgggtatgctgtatctgcagcgtatgccaaccgagtttgacgtcgctatggcaaccgtgtactatctggccgatcgtaacgtgagcggcgaaactttccatccgtctggtggtttgcgctacgagcgtaccccgaccggtggcgagctgttcggcctgccatcgccggaacgtctggcggagctggttggtagcacggtgtacctgatcggtgaacacctgaccgagcacctgaacctgctggctcgtgcctatttggagcgctacggtgcccgtcaagtggtgatgattgttgagacggaaaccggtgcggaaaccatgcgtcgtctgttgcatgatcacgtcgaggcaggtcgcctgatgactattgtggcaggtgatcagattgaggcagcgattgaccaagcgatcacgcgctatggccgtccgggtccggtggtgtgcactccattccgtccactgccaaccgttccgctggtcggtcgtaaagactccgattggagcaccgttttgagcgaggcggaatttgcggaactgtgtgagcatcagctgacccaccatttccgtgttgctcgtaagatcgccttgtcggatggcgcgtcgctggcgttggttaccccggaaacgactgcgactagcaccacggagcaatttgctctggcgaacttcatcaagaccaccctgcacgcgttcaccgcgaccatcggtgttgagtcggagcgcaccgcgcaacgtattctgattaaccaggttgatctgacgcgccgcgcccgtgcggaagagccgcgtgacccgcacgagcgtcagcaggaattggaacgcttcattgaagccgttctgctggttaccgctccgctgcctcctgaggcagacacgcgctacgcaggccgtattcaccgcggtcgtgcgattaccgtctaagacgaattctctagatatcgctcaatactgaccatttaaatcatacctgacctccatagcagaaagtcaaaagcctccgaccggaggcttttgacttgatcggcacgtaagaggttccaactttcaccataatgaaataagatcactaccgggcgtattttttgagttatcgagattttcaggagctaaggaagctaaaatgagtattcaacatttccgtgtcgcccttattcccttttttgcggcattttgccttcctgtttttgctcacccagaaacgctggtgaaagtaaaagatgctgaagatcagttgggtgcacgagtgggttacatcgaactggatctcaacagcggtaagatccttgagagtttacgccccgaagaacgttttccaatgatgagcacttttaaagttctgctatgtggcgcggtattatcccgtattgacgccgggcaagagcaactcggtcgccgcatacactattctcagaatgacttggttgagtactcaccagtcacagaaaagcatctcacggatggcatgacagtaagagaattatgcagtgctgccataaccatgagtgataacactgcggccaacttacttctggcaacgatcggaggaccgaaggagctaaccgcttttttgcacaacatgggggatcatgtaactcgccttgatcgttgggaaccggagctgaatgaagccataccaaacgacgagcgtgacaccacgatgcctgtagcaatggcaacaacgttgcgcaaactattaactggcgaactacttactctagcttcccggcaacaattaatagactggatggaggcggataaagttgcaggatcacttctgcgctcggccctcccggctggctggtttattgctgataaatctggagccggtgagcgtgggtctcgcggtatcattgcagcactggggccagatggtaagccctcccgcatcgtagttatctacacgacggggagtcaggcaactatggatgaacgaaatagacagatcgctgagataggtgcctcactgattaagcattggtaatgagggcccaaatgtaatcacctggctcaccttcgggtgggcctttctgcgttgctggcgtttttccataggctccgcccccctgacgagcatcacaaaaatcgatgctcaagtcagaggtggcgaaacccgacaggactataaagataccaggcgtttccccctggaagctccctcgtgcgctctcctgttccgaccctgccgcttaccggatacctgtccgcctttctcccttcgggaagcgtggcgctttctcatagctcacgctgtaggtatctcagttcggtgtaggtcgttcgctccaagctgggctgtgtgcacgaaccccccgttcagcccgaccgctgcgccttatccggtaactatcgtcttgagtccaacccggtaagacacgacttatcgccactggcagcagccactggtaacaggattagcagagcgaggtatgtaggcggtgctacagagttcttgaagtggtggcctaactacggctacactagaagaacagtatttggtatctgcgctctgctgaagccagttacctcggaaaaagagttggtagctcttgatccggcaaacaaaccaccgctggtagcggtggtttttttgtttgcaagcagcagattacgcgcagaaaaaaaggatctcaagaagatcctttgattttctaccgaagaaaggcccacccgtgaaggtgagccagtgagttgattgcagtccagttacgctggagtctgaggctcgtcctgaatgatatcaagcttgaattcgtt

SEQ ID NO: 65 - DNA, 27 bp, Artificial Sequence
  Description of Artificial Sequence: Synthetic primer 1
gggaaccatggcaattggcataccaag

SEQ ID NO: 66 - DNA, 28 bp, Artificial Sequence
  Description of Artificial Sequence: Synthetic primer 2
gggttacagagctttcaggattgcatcc

SEQ ID NO: 67 - DNA, 26 bp, Artificial Sequence
  Description of Artificial Sequence: Synthetic primer 3
gggaacggcggggaaaaacaaacgtt

SEQ ID NO: 68 - DNA, 30 bp, Artificial Sequence
  Description of Artificial Sequence: Synthetic primer 4
ggtccatggtaattctccacgcttataagc

SEQ ID NO: 69 - DNA, 2404 bp, Artificial Sequence
  Description of Artificial Sequence: Synthetic pBT-3 vector polynucleotide
aacgaattcaagcttgatatcattcaggacgagcctcagactccagcgtaactggactgaaaacaaactaaagcgcccttgtggcgctttagttttgttccgcggccaccggctggctcgcttcgctcggcccgtggacaaccctgctggacaagctgatggacaggctgcgcctgcccacgagcttgaccacagggattgcccaccggctacccagccttcgaccacatacccaccggctccaactgcgcggcctgcggccttgccccatcaatttttttaattttctctggggaaaagcctccggcctgcggcctgcgcgcttcgcttgccggttggacaccaagtggaaggcgggtcaaggctcgcgcagcgaccgcgcagcggcttggccttgacgcgcctggaacgacccaagcctatgcgagtgggggcagtcgaaggcgaagcccgcccgcctgccccccgagcctcacggcggcgagtgcgggggttccaagggggcagcgccaccttgggcaaggccgaaggccgcgcagtcgatcaacaagccccggaggggccactttttgccggagggggagccgcgccgaaggcgtgggggaaccccgcaggggtgcccttctttgggcaccaaagaactagatatagggcgaaatgcgaaagacttaaaaatcaacaacttaaaaaaggggggtacgcaacagctcattgcggcaccccccgcaatagctcattgcgtaggttaaagaaaatctgtaattgactgccacttttacgcaacgcataattgttgtcgcgctgccgaaaagttgcagctgattgcgcatggtgccgcaaccgtgcggcaccctaccgcatggagataagcatggccacgcagtccagagaaatcggcattcaagccaagaacaagcccggtcactgggtgcaaacggaacgcaaagcgcatgaggcgtgggccgggcttattgcgaggaaacccacggcggcaatgctgctgcatcacctcgtggcgcagatgggccaccagaacgccgtggtggtcagccagaagacactttccaagctcatcggacgttctttgcggacggtccaatacgcagtcaaggacttggtggccgagcgctggatctccgtcgtgaagctcaacggccccggcaccgtgtcggcctacgtggtcaatgaccgcgtggcgtggggccagccccgcgaccagttgcgcctgtcggtgttcagtgccgccgtggtggttgatcacgacgaccaggacgaatcgctgttggggcatggcgacctgcgccgcatcccgaccctgtatccgggcgagcagcaactaccgaccggccccggcgaggagccgcccagccagcccggcattccgggcatggaaccagacctgccagccttgaccgaaacggaggaatgggaacggcgcgggcagcagcgcctgccgatgcccgatgagccgtgttttctggacgatggcgagccgttggagccgccgacacgggtcacgctgccgcgccggtagtacgtaagaggttccaactttcaccataatgaaataagatcactaccgggcgtattttttgagttatcgagattttcaggagctaaggaagctaaaatggagaaaaaaatcactggatataccaccgttgatatatcccaatggcatcgtaaagaacattttgaggcatttcagtcagttgctcaatgtacctataaccagaccgttcagctggatattacggcctttttaaagaccgtaaagaaaaataagcacaagttttatccggcctttattcacattcttgcccgcctgatgaatgctcatccggaattccgtatggcaatgaaagacggtgagctggtgatatgggatagtgttcacccttgttacaccgttttccatgagcaaactgaaacgttttcatcgctctggagtgaataccacgacgatttccggcagtttctacacatatattcgcaagatgtggcgtgttacggtgaaaacctggcctatttccctaaagggtttattgagaatatgtttttcgtctcagccaatccctgggtgagtttcaccagttttgatttaaacgtggccaatatggacaacttcttcgcccccgttttcaccatgggcaaatattatacgcaaggcgacaaggtgctgatgccgctggcgattcaggttcatcatgccgtttgtgatggcttccatgtcggcagaatgcttaatgaattacaacagtactgcgatgagtggcagggcggggcgtaaacgcgtggatccccctcaagtcaaaagcctccggtcggaggcttttgactttctgctatggaggtcaggtatgatttaaatggtcagtattgagcgatatctagagaattcgtc

SEQ ID NO: 70 - DNA, 21 bp, Artificial Sequence
  Description of Artificial Sequence: Synthetic primer 7
aacgaattcaagcttgatatc

SEQ ID NO: 71 - DNA, 21 bp, Artificial Sequence
  Description of Artificial Sequence: Synthetic primer 8
gaattcgttgacgaattctct

SEQ ID NO: 72 - DNA, 24 bp, Artificial Sequence
  Description of Artificial Sequence: Synthetic primer 9
ggaaacagctatgaccatgattac

SEQ ID NO: 73 - DNA, 26 bp, Artificial Sequence
  Description of Artificial Sequence: Synthetic primer 10
ttgtaaaacgacggccagtgagcgcg

SEQ ID NO: 74 - DNA, 7263 bp, Artificial Sequence
  Description of Artificial Sequence: Synthetic pj251:26385 plasmid polynucleotide
gcttttagaaaaactcatcgagcatcaaatgaaactgcaatttattcatatcaggattatcaataccatatttttgaaaaagccgtttctgtaatgaaggagaaaactcaccgaggcagttccataggatggcaagatcctggtatcggtctgcgattccgactcgtccaacatcaatacaacctattaatttcccctcgtcaaaaataaggttatcaagtgagaaatcaccatgagtgacgactgaatccggtgagaatggcaaaagtttatgcatttctttccagacttgttcaacaggccagccattacgctcgtcatcaaaatcactcgcatcaaccaaaccgttattcattcgtgattgcgcctgagcgaggcgaaatacgcgatcgctgttaaaaggacaattacaaacaggaatcgagtgcaaccggcgcaggaacactgccagcgcatcaacaatattttcacctgaatcaggatattcttctaatacctggaacgctgtttttccggggatcgcagtggtgagtaaccatgcatcatcaggagtacggataaaatgcttgatggtcggaagtggcataaattccgtcagccagtttagtctgaccatctcatctgtaacatcattggcaacgctacctttgccatgtttcagaaacaactctggcgcatcgggcttcccatacaagcgatagattgtcgcacctgattgcccgacattatcgcgagcccatttatacccatataaatcagcatccatgttggaatttaatcgcggcctcgacgtttcccgttgaatatggctcatattcttcctttttcaatattattgaagcatttatcagggttattgtctcatgagcggatacatatttgaatgtatttagaaaaataaacaaataggggtcagtgttacaaccaattaaccaattctgaacattatcgcgagcccatttatacctgaatatggctcataacaccccttgtttgcctggcggcagtagcgcggtggtcccacctgaccccatgccgaactcagaagtgaaacgccgtagcgccgatggtagtgtggggactccccatgcgagagtagggaactgccaggcatcaaataaaacgaaaggctcagtcgaaagactgggcctttcgcccgggctaattagggggtgtcgcccttattcgactctatagggaagttcctattctctagaaagtataggaacttctgaaggggggacagctgtctcaaatgtctcggaatcgctgacgattcccaggtttctccggcaagcatagcgcatggcgtctccatgcgagaatgtcgcgcttgccggataaaaggggagccgctatcggaatggacgcaagccacggccgcagcaggtgcggtcgagggcttccagccagttccagggcagatgtgccggcagaccctcccgctttgggggaggcgcaagccgggtccattcggatagcatctccccatgcaaagtgccggccagggcaatgcccggagccggttcgaggcgccggtttgaataaatgacaaaaagcaaagcctttgtgccgatgaatctctatactgtttcacagacctgctgccctgcggggcaggaggaaaaacatgtccctgaacttcctggacttcgagcagccgattgcagaactggaagcgaagattgacagcctgaccgcggttagccgtcaagatgagaaactggacattaacatcgacgaagaggtccaccgtttgcgtgagaagtctgttgaactgactcgcaaaatctttgctgatttgggcgcatggcagattgcccagttggctcgccacccacaacgcccatataccctggactacgtgcgcctggcgtttgacgagttcgacgaactggcaggcgaccgcgcctatgcggacgataaagcaattgtcggcggtattgctcgtttggatggccgtccggtgatgattatcggccatcaaaaaggccgcgagacgaaagaaaagattcgtcgtaactttggtatgccggcaccggagggctaccgcaaggccctgcgtctgatgcaaatggccgaacgctttaagatgccgattatcacgttcattgatacgccgggtgcgtacccaggcgttggtgcggaagagcgtggtcagagcgaggccatcgcacgtaacctgcgtgagatgtctcgtctgggtgtgccggtcgtttgcaccgtgattggcgagggcggtagcggtggtgcgttggcgatcggtgtcggtgataaggtcaacatgctgcaatacagcacgtacagcgtcattagcccggaaggttgcgcttccattctgtggaagagcgcggataaagcaccattggcagcggaagcgatgggtatcatcgcaccgcgtctgaaagaactgaagttgattgattctatcatcccggaaccgctgggcggtgctcaccgtaatccggaggcgatggcagccagcctgaaggcccagctgctggcggacctggcggatctggacgtgctgagcacggaggatctgaaaaaccgtcgctatcagcgcttgatgagctatggctacgcgtagtaaaggaggaaaatcatgagctggattgaacgcattaagtccaatatcaccccgacccgcaaggcgagcatccctgaaggcgtctggaccaaatgcgatagctgcggtcaggttttgtatcgtgcggagctggagcgtaacctggaagtgtgcccgaaatgcgaccatcacatgcgtatgaccgctcgtaatcgtctgcatagcctgctggatgagggcagcctggtcgagctgggtagcgaactggaaccgaaagatgttctgaaattccgtgattccaagaagtataaggatcgtttggcatctgcacaaaaagaaaccggtgagaaggacgcactggttgttatgaaaggcaccctgtatggtatgccggttgttgctgcggcgttcgagtttgcgtttatgggtggcagcatgggttccgtggtgggcgcacgctttgtgcgtgccgtggagcaggcgctggaggataactgtcctctgatttgtttcagcgcgagcggtggtgcgcgtatgcaagaggccctgatgagcctgatgcagatggcaaaaacctcggcagccctggcgaagatgcaagaacgcggcctgccgtacatttccgtcctgaccgaccctacgatgggcggtgtcagcgccagctttgcgatgctgggtgatttgaacatcgcagagccgaaggctctgattggttttgctggtccgcgtgttattgaacagacggttcgcgaaaagttgccgcctggtttccagcgcagcgagttcctgattgagaaaggtgccatcgacatgatcgttcgccgtccagaaatgcgtctgaaactggcgagcattctggcgaaattgatgaatctgccggctccgaatcctgaagcaccgcgtgagggtgtcgtggttccgccggtcccggaccaagagccggaggcataatagcacgtggagttaaccacgcggcttgccaacggggtctgaatcgctttttttgtatataatgcgtgtgaaatttcataccacaggcgaaggaggaaaaaccatggacattcgtaagatcaagaaactgattgaactggttgaagaaagcggcatcagcgagctggagatcagcgaaggtgaagagagcgtccgtatttcccgtgcggcaccggcagcgagctttccggttatgcagcaagcatacgccgctccgatgatgcaacagccggcacagagcaacgccgctgcaccggcgaccgttccaagcatggaggcaccggcagcggccgagatttcgggtcatatcgtgcgtagcccgatggtgggcaccttctatcgcacgccgtcgccggacgcaaaagccttcatcgaagtcggccagaaggtcaatgtcggcgacacgctgtgtatcgttgaggcaatgaaaatgatgaaccagattgaagcggataagagcggtactgttaaagcgatcctggtggaatccggccagcctgttgagttcgatgaaccgctggttgtgatcgagtaacgaggcgaacatgttggacaagatcgtgattgcaaaccgcggtgaaatcgcgctgcgtatcttgcgcgcgtgtaaagagctgggcattaagactgttgccgtgcattccagcgcagaccgcgacctgaagcatgttctgctggccgacgaaacggtttgcatcggtccggcaccgagcgtgaaaagctatctgaacatcccggccatcatctctgcggcagagatcaccggtgcagtggcgattcatccgggctacggtttcctgagcgagaacgctaactttgctgaacaagtggagcgtagcggtttcatcttcattggccctaaggcggagacgattcgcctgatgggcgacaaagtgagcgccattgcagcgatgaaaaaggccggtgtgccgtgtgttccgggcagcgatggtccgctgggtgacgatatggacaagaaccgtgccatcgctaaacgtattggctacccggtcattatcaaagcctctggtggtggcggtggccgtggtatgcgtgtcgtccgtggtgatgcggaactggcgcaaagcatcagcatgacccgtgcggaagccaaagcggcgttctctaacgatatggtgtatatggagaagtatctggagaatccgcgccacgttgaaatccaagttctggcggatggtcagggcaatgcgatctacttggcagaacgtgattgctccatgcaacgccgtcatcagaaggtggtggaagaggcaccggctccgggtattacgccggaactgcgtcgctacatcggtgagcgctgtgcgaaagcgtgtgtggacattggttaccgtggtgcgggtacgtttgagttcctgttcgaaaatggtgagttttacttcattgaaatgaatacccgcatccaggttgagcacccggtgaccgagatgattactggcgttgatctgatcaaagagcaactgcgcattgcggctggtcagccgctgtcgatcaagcaagaagaggtgcacgttcgtggtcacgcggtcgagtgccgtatcaatgcggaggacccgaatacctttctgccgagccctggtaagatcacgcgttttcacgcgccaggtggttttggcgttcgttgggagtctcacatctacgccggttacaccgtgccgccgtactatgacagcatgattggtaaactgatctgctatggcgaaaatcgtgatgtcgcgatcgcccgcatgaaaaacgcgctgcaagagctgatcattgatggcattaagaccaatgtggatttgcagatccgcattatgaacgacgagaatttccagcacggcggtacgaacattcactacctggaaaagaaactgggcctgcaagagaaataatagggtaccctagcataaccccttggggcctctaaacgggtcttgaggggttttttgaatcccccgggatgtctatcttaaggtagccaaagtttaaactttggctaccttaagatagacatactgccggcctggttcaaccagtcggcagccggcgctggcgcccgcgtattgcggtgcagccagcgcggcgcacaaggcggcgggcgtttcgtttcgccgcccgtttcgcgggccgtcaaggcccgcgaatcgtttctgcccgcgcggcattcctcgctttttgcgccaattcaccgggttttccttaagccccgtcgcttttcttagtgccttgttgggcatagaatcagggcagcggcgcagccagcaccatgttcgtgcagcgcggccctcgcgggggcgaggctgcagacagctgtcaaaatgaagggaagttcctatactttctagagaataggaacttctatagggagtcgaataagggcgacacaaaaggtattctaaatgcataataaatactgataacatcttatagtttgtattatattttgtattatcgttgacatgtataattttgatatcaaaaactgattttccctttattattttcgagatttattttcttaattctctttaacaaactagaaatattgtatatacaaaaaatcataaataatagatgaatagtttaattataggtgttcatcaatcgaaaaagcaacgtatcttatttaaagtgcgttgcttttttctcatttataaggttaaataattctcatatatcaagcaaagtgacaggcgcccttaaatattctgacaaatgctctttccctaaactccccccataaaaaaacccgccgaagcgggtttttacgttatttgcggattaacgattactcgttatcagaaccgcccaggatgcctggcagttccctactctcgccgctgcgctcggtcgttcggctgcgggacctcagcgctagcggagtgtatactggcttactatgttggcactgatgagggtgtcagtgaagtgcttcatgtggcaggagaaaaaaggctgcaccggtgcgtcagcagaatatgtgatacaggatatattccgcttcctcgctcactgactcgctacgctcggtcgttcgactgcggcgagcggaaatggcttacgaacggggcggagatttcctggaagatgccaggaagatacttaacagggaagtgagagggccgcggcaaagccgtttttccataggctccgcccccctgacaagcatcacgaaatctgacgctcaaatcagtggtggcgaaacccgacaggactataaagataccaggcgtttccccctggcggctccctcgtgcgctctcctgttcctgcctttcggtttaccggtgtcattccgctgttatggccgcgtttgtctcattccacgcctgacactcagttccgggtaggcagttcgctccaagctggactgtatgcacgaaccccccgttcagtccgaccgctgcgccttatccggtaactatcgtcttgagtccaacccggaaagacatgcaaaagcaccactggcagcagccactggtaattgatttagaggagttagtcttgaagtcatgcgccggttaaggctaaactgaaaggacaagttttggtgactgcgctcctccaagccagttacctcggttcaaagagttggtagctcagagaaccttcgaaaaaccgccctgcaaggcggttttttcgttttcagagcaagagattacgcgcagaccaaaacgatctcaagaagatcatcttattaa

SEQ ID NO: 75 - DNA, 22 bp, Artificial Sequence
  Description of Artificial Sequence: Synthetic pcr primer 1
gcggggcaggaggaaaaacatg

SEQ ID NO: 76 - DNA, 45 bp, Artificial Sequence
  Description of Artificial Sequence: Synthetic primer 1
gcttataagcgaataaaggaagatggccgccccgcagggcagcag

SEQ ID NO: 77 - DNA, 7298 bp, Artificial Sequence
  Description of Artificial Sequence: Synthetic pJ251:PtpiA:accAD-PrpiA:accBC polynucleotide
gcttttagaaaaactcatcgagcatcaaatgaaactgcaatttattcatatcaggattatcaataccatatttttgaaaaagccgtttctgtaatgaaggagaaaactcaccgaggcagttccataggatggcaagatcctggtatcggtctgcgattccgactcgtccaacatcaatacaacctattaatttcccctcgtcaaaaataaggttatcaagtgagaaatcaccatgagtgacgactgaatccggtgagaatggcaaaagtttatgcatttctttccagacttgttcaacaggccagccattacgctcgtcatcaaaatcactcgcatcaaccaaaccgttattcattcgtgattgcgcctgagcgaggcgaaatacgcgatcgctgttaaaaggacaattacaaacaggaatcgagtgcaaccggcgcaggaacactgccagcgcatcaacaatattttcacctgaatcaggatattcttctaatacctggaacgctgtttttccggggatcgcagtggtgagtaaccatgcatcatcaggagtacggataaaatgcttgatggtcggaagtggcataaattccgtcagccagtttagtctgaccatctcatctgtaacatcattggcaacgctacctttgccatgtttcagaaacaactctggcgcatcgggcttcccatacaagcgatagattgtcgcacctgattgcccgacattatcgcgagcccatttatacccatataaatcagcatccatgttggaatttaatcgcggcctcgacgtttcccgttgaatatggctcatattcttcctttttcaatattattgaagcatttatcagggttattgtctcatgagcggatacatatttgaatgtatttagaaaaataaacaaataggggtcagtgttacaaccaattaaccaattctgaacattatcgcgagcccatttatacctgaatatggctcataacaccccttgtttgcctggcggcagtagcgcggtggtcccacctgaccccatgccgaactcagaagtgaaacgccgtagcgccgatggtagtgtggggactccccatgcgagagtagggaactgccaggcatcaaataaaacgaaaggctcagtcgaaagactgggcctttcgcccgggctaattagggggtgtcgcccttattcgactctatagggaagttcctattctctagaaagtataggaacttctgaaggggggacagctgtctcaaatgtctcggaatcgctgacgattcccaggtttctccggcaagcatagcgcatggcgtctccatgcgagaatgtcgcgcttgccggataaaaggggagccgctatcggaatggacgcaagccacggccgcagcaggtgcggtcgagggcttccagccagttccagggcagatgtgccggcagaccctcccgctttgggggaggcgcaagccgggtccattcggatagcatctccccatgcaaagtgccggccagggcaatgcccggagccggttcgaggcgccggtttgaataaatgacaaaaagcaaagcctttgtgccgatgaatctctatactgtttcacagacctgctgccctgcggggcggccatcttcctttattcgcttataagcgcggggcaggaggaaaaacatgtccctgaacttcctggacttcgagcagccgattgcagaactggaagcgaagattgacagcctgaccgcggttagccgtcaagatgagaaactggacattaacatcgacgaagaggtccaccgtttgcgtgagaagtctgttgaactgactcgcaaaatctttgctgatttgggcgcatggcagattgcccagttggctcgccacccacaacgcccatataccctggactacgtgcgcctggcgtttgacgagttcgacgaactggcaggcgaccgcgcctatgcggacgataaagcaattgtcggcggtattgctcgtttggatggccgtccggtgatgattatcggccatcaaaaaggccgcgagacgaaagaaaagattcgtcgtaactttggtatgccggcaccggagggctaccgcaaggccctgcgtctgatgcaaatggccgaacgctttaagatgccgattatcacgttcattgatacgccgggtgcgtacccaggcgttggtgcggaagagcgtggtcagagcgaggccatcgcacgtaacctgcgtgagatgtctcgtctgggtgtgccggtcgtttgcaccgtgattggcgagggcggtagcggtggtgcgttggcgatcggtgtcggtgataaggtcaacatgctgcaatacagcacgtacagcgtcattagcccggaaggttgcgcttccattctgtggaagagcgcggataaagcaccattggcagcggaagcgatgggtatcatcgcaccgcgtctgaaagaactgaagttgattgattctatcatcccggaaccgctgggcggtgctcaccgtaatccggaggcgatggcagccagcctgaaggcccagctgctggcggacctggcggatctggacgtgctgagcacggaggatctgaaaaaccgtcgctatcagcgcttgatgagctatggctacgcgtagtaaaggaggaaaatcatgagctggattgaacgcattaagtccaatatcaccccgacccgcaaggcgagcatccctgaaggcgtctggaccaaatgcgatagctgcggtcaggttttgtatcgtgcggagctggagcgtaacctggaagtgtgcccgaaatgcgaccatcacatgcgtatgaccgctcgtaatcgtctgcatagcctgctggatgagggcagcctggtcgagctgggtagcgaactggaaccgaaagatgttctgaaattccgtgattccaagaagtataaggatcgtttggcatctgcacaaaaagaaaccggtgagaaggacgcactggttgttatgaaaggcaccctgtatggtatgccggttgttgctgcggcgttcgagtttgcgtttatgggtggcagcatgggttccgtggtgggcgcacgctttgtgcgtgccgtggagcaggcgctggaggataactgtcctctgatttgtttcagcgcgagcggtggtgcgcgtatgcaagaggccctgatgagcctgatgcagatggcaaaaacctcggcagccctggcgaagatgcaagaacgcggcctgccgtacatttccgtcctgaccgaccctacgatgggcggtgtcagcgccagctttgcgatgctgggtgatttgaacatcgcagagccgaaggctctgattggttttgctggtccgcgtgttattgaacagacggttcgcgaaaagttgccgcctggtttccagcgcagcgagttcctgattgagaaaggtgccatcgacatgatcgttcgccgtccagaaatgcgtctgaaactggcgagcattctggcgaaattgatgaatctgccggctccgaatcctgaagcaccgcgtgagggtgtcgtggttccgccggtcccggaccaagagccggaggcataatagcacgtggagttaaccacgcggcttgccaacggggtctgaatcgctttttttgtatataatgcgtgtgaaatttcataccacaggcgaaggaggaaaaaccatggacattcgtaagatcaagaaactgattgaactggttgaagaaagcggcatcagcgagctggagatcagcgaaggtgaagagagcgtccgtatttcccgtgcggcaccggcagcgagctttccggttatgcagcaagcatacgccgctccgatgatgcaacagccggcacagagcaacgccgctgcaccggcgaccgttccaagcatggaggcaccggcagcggccgagatttcgggtcatatcgtgcgtagcccgatggtgggcaccttctatcgcacgccgtcgccggacgcaaaagccttcatcgaagtcggccagaaggtcaatgtcggcgacacgctgtgtatcgttgaggcaatgaaaatgatgaaccagattgaagcggataagagcggtactgttaaagcgatcctggtggaatccggccagcctgttgagttcgatgaaccgctggttgtgatcgagtaacgaggcgaacatgttggacaagatcgtgattgcaaaccgcggtgaaatcgcgctgcgtatcttgcgcgcgtgtaaagagctgggcattaagactgttgccgtgcattccagcgcagaccgcgacctgaagcatgttctgctggccgacgaaacggtttgcatcggtccggcaccgagcgtgaaaagctatctgaacatcccggccatcatctctgcggcagagatcaccggtgcagtggcgattcatccgggctacggtttcctgagcgagaacgctaactttgctgaacaagtggagcgtagcggtttcatcttcattggccctaaggcggagacgattcgcctgatgggcgacaaagtgagcgccattgcagcgatgaaaaaggccggtgtgccgtgtgttccgggcagcgatggtccgctgggtgacgatatggacaagaaccgtgccatcgctaaacgtattggctacccggtcattatcaaagcctctggtggtggcggtggccgtggtatgcgtgtcgtccgtggtgatgcggaactggcgcaaagcatcagcatgacccgtgcggaagccaaagcggcgttctctaacgatatggtgtatatggagaagtatctggagaatccgcgccacgttgaaatccaagttctggcggatggtcagggcaatgcgatctacttggcagaacgtgattgctccatgcaacgccgtcatcagaaggtggtggaagaggcaccggctccgggtattacgccggaactgcgtcgctacatcggtgagcgctgtgcgaaagcgtgtgtggacattggttaccgtggtgcgggtacgtttgagttcctgttcgaaaatggtgagttttacttcattgaaatgaatacccgcatccaggttgagcacccggtgaccgagatgattactggcgttgatctgatcaaagagcaactgcgcattgcggctggtcagccgctgtcgatcaagcaagaagaggtgcacgttcgtggtcacgcggtcgagtgccgtatcaatgcggaggacccgaatacctttctgccgagccctggtaagatcacgcgttttcacgcgccaggtggttttggcgttcgttgggagtctcacatctacgccggttacaccgtgccgccgtactatgacagcatgattggtaaactgatctgctatggcgaaaatcgtgatgtcgcgatcgcccgcatgaaaaacgcgctgcaagagctgatcattgatggcattaagaccaatgtggatttgcagatccgcattatgaacgacgagaatttccagcacggcggtacgaacattcactacctggaaaagaaactgggcctgcaagagaaataatagggtaccctagcataaccccttggggcctctaaacgggtcttgaggggttttttgaatcccccgggatgtctatcttaaggtagccaaagtttaaactttggctaccttaagatagacatactgccggcctggttcaaccagtcggcagccggcgctggcgcccgcgtattgcggtgcagccagcgcggcgcacaaggcggcgggcgtttcgtttcgccgcccgtttcgcgggccgtcaaggcccgcgaatcgtttctgcccgcgcggcattcctcgctttttgcgccaattcaccgggttttccttaagccccgtcgcttttcttagtgccttgttgggcatagaatcagggcagcggcgcagccagcaccatgttcgtgcagcgcggccctcgcgggggcgaggctgcagacagctgtcaaaatgaagggaagttcctatactttctagagaataggaacttctatagggagtcgaataagggcgacacaaaaggtattctaaatgcataataaatactgataacatcttatagtttgtattatattttgtattatcgttgacatgtataattttgatatcaaaaactgattttccctttattattttcgagatttattttcttaattctctttaacaaactagaaatattgtatatacaaaaaatcataaataatagatgaatagtttaattataggtgttcatcaatcgaaaaagcaacgtatcttatttaaagtgcgttgcttttttctcatttataaggttaaataattctcatatatcaagcaaagtgacaggcgcccttaaatattctgacaaatgctctttccctaaactccccccataaaaaaacccgccgaagcgggtttttacgttatttgcggattaacgattactcgttatcagaaccgcccaggatgcctggcagttccctactctcgccgctgcgctcggtcgttcggctgcgggacctcagcgctagcggagtgtatactggcttactatgttggcactgatgagggtgtcagtgaagtgcttcatgtggcaggagaaaaaaggctgcaccggtgcgtcagcagaatatgtgatacaggatatattccgcttcctcgctcactgactcgctacgctcggtcgttcgactgcggcgagcggaaatggcttacgaacggggcggagatttcctggaagatgccaggaagatacttaacagggaagtgagagggccgcggcaaagccgtttttccataggctccgcccccctgacaagcatcacgaaatctgacgctcaaatcagtggtggcgaaacccgacaggactataaagataccaggcgtttccccctggcggctccctcgtgcgctctcctgttcctgcctttcggtttaccggtgtcattccgctgttatggccgcgtttgtctcattccacgcctgacactcagttccgggtaggcagttcgctccaagctggactgtatgcacgaaccccccgttcagtccgaccgctgcgccttatccggtaactatcgtcttgagtccaacccggaaagacatgcaaaagcaccactggcagcagccactggtaattgatttagaggagttagtcttgaagtcatgcgccggttaaggctaaactgaaaggacaagttttggtgactgcgctcctccaagccagttacctcggttcaaagagttggtagctcagagaaccttcgaaaaaccgccctgcaaggcggttttttcgttttcagagcaagagattacgcgcagaccaaaacgatctcaagaagatcatcttattaa

SEQ ID NO: 78 - DNA, 17 bp, Artificial Sequence
  Description of Artificial Sequence: Synthetic pcr primer FW043
atgggttttctttccgg

SEQ ID NO: 79 - DNA, 19 bp, Artificial Sequence
  Description of Artificial Sequence: Synthetic pcr primer FW047
ttatttcagttcgagttcg

SEQ ID NO: 80 - DNA, 21 bp, Artificial Sequence
  Description of Artificial Sequence: Synthetic pcr primer FW044
ctatccatcgcctacggtatc

SEQ ID NO: 81 - DNA, 18 bp, Artificial Sequence
  Description of Artificial Sequence: Synthetic pcr primer FW045
cgttgcaatggcaaaagc

SEQ ID NO: 82 - DNA, 18 bp, Artificial Sequence
  Description of Artificial Sequence: Synthetic pcr primer FW046
cggcggtttcagcattgc

SEQ ID NO: 83 - protein, 359 aa, Sulfolobus tokodaii
MILMRRTLKAAILGATGLVGIEYVRMLSNHPYIKPAYLAGKGSVGKPYGEVVRWQTVGQVPKEIADMEIKPTDPKLMDDVDIIFSPLPQGAAGPVEEQFAKEGFPVISNSPDHRFDPDVPLLVPELNPHTISLIDEQRKRREWKGFIVTTPLCTAQGAAIPLGAIFKDYKMDGAFITTIQSLSGAGYPGIPSLDVVDNILPLGDGYDAKTIKEIFRILSEVKRNVDEPKLEDVSLAATTHRIATIHGHYEVLYVSFKEETAAEKVKETLENFRGEPQDLKLPTAPSKPIIVMNEDTRPQVYFDRWAGDIPGMSVVVGRLKQVNKRMIRLVSLIHNTVRGAAGGGILAAELLVEKGYIEK

SEQ ID NO: 84 - DNA, 780 bp, Escherichia coli
atgggttttctttccggtaagcgcattctggtaaccggtgttgccagcaaactatccatcgcctacggtatcgctcaggcgatgcaccgcgaaggagctgaactggcattcacctaccagaacgacaaactgaaaggccgcgtagaagaatttgccgctcaattgggttctgacatcgttctgcagtgcgatgttgcagaagatgccagcatcgacaccatgttcgctgaactggggaaagtttggccgaaatttgacggtttcgtacactctattggttttgcacctggcgatcagctggatggtgactatgttaacgccgttacccgtgaaggcttcaaaattgcccacgacatcagctcctacagcttcgttgcaatggcaaaagcttgccgctccatgctgaatccgggttctgccctgctgaccctttcctaccttggcgctgagcgcgctatcccgaactacaacgttatgggtctggcaaaagcgtctctggaagcgaacgtgcgctatatggcgaacgcgatgggtccggaaggtgtgcgtgttaacgccatctctgctggtccgatccgtactctggcggcctccggtatcaaagacttccgcaaaatgctggctcattgcgaagccgttaccccgattcgccgtaccgttactattgaagatgtgggtaactctgcggcattcctgtgctccgatctctctgccggtatctccggtgaagtggtccacgttgacggcggtttcagcattgctgcaatgaacgaactcgaa

SEQ ID NO: 85 - protein, 262 aa, Escherichia coli; identical to SEQ ID NO: 14

SEQ ID NO: 86 - DNA, 21 bp, Artificial Sequence
  Description of Artificial Sequence: Synthetic primer
gagcacagtatcgcaaacatg

SEQ ID NO: 87 - DNA, 18 bp, Artificial Sequence
  Description of Artificial Sequence: Synthetic primer
ctgccagcctggaaaaag

SEQ ID NO: 88 - DNA, 20 bp, Artificial Sequence
  Description of Artificial Sequence: Synthetic primer
tctatgggttgcggttgaat

SEQ ID NO: 89 - DNA, 23 bp, Artificial Sequence
  Description of Artificial Sequence: Synthetic primer
tgagactgactgttaataagcgc

SEQ ID NO: 90 - DNA, 23 bp, Artificial Sequence
  Description of Artificial Sequence: Synthetic primer
tagttttattgggtgtccggccc

SEQ ID NO: 91 - DNA, 23 bp, Artificial Sequence
  Description of Artificial Sequence: Synthetic primer
agcagcttataacgccggaccag

SEQ ID NO: 92 - DNA, 23 bp, Artificial Sequence
  Description of Artificial Sequence: Synthetic primer
tggaactattggccaaactaatg

SEQ ID NO: 93 - DNA, 23 bp, Artificial Sequence
  Description of Artificial Sequence: Synthetic primer
cgttgattttccggcagaagtca

SEQ ID NO: 94 - DNA, 16 bp, Artificial Sequence
  Description of Artificial Sequence: Synthetic primer
gcgcccatacgcccac

SEQ ID NO: 95 - DNA, 21 bp, Artificial Sequence
  Description of Artificial Sequence: Synthetic primer
gccgtgggcgaaaaacggctt

SEQ ID NO: 96 - DNA, 70 bp, Artificial Sequence
  Description of Artificial Sequence: Synthetic primer
cgtgcataacgtgttgggttcataaaacattaatttcggtttcgggtgacgtgtaggctggagctgcttc

SEQ ID NO: 97 - DNA, 75 bp, Artificial Sequence
  Description of Artificial Sequence: Synthetic primer
ggctccctgacgtttttttagccacgtatcaattataggtacttccatgtcgagtgtgtaggctggagctgcttc

SEQ ID NO: 98 - DNA, 24 bp, Artificial Sequence
  Description of Artificial Sequence: Synthetic primer
aatcttgcttacgccacctggaag

SEQ ID NO: 99 - DNA, 25 bp, Artificial Sequence
  Description of Artificial Sequence: Synthetic primer
caggcagcgcatcaggcagccctgg

SEQ ID NO: 100 - DNA, 20 bp, Artificial Sequence
  Description of Artificial Sequence: Synthetic primer
ccattacctcaacggcaaaa

SEQ ID NO: 101 - DNA, 20 bp, Artificial Sequence
  Description of Artificial Sequence: Synthetic primer
aagcaataacgttccggttg

SEQ ID NO: 102 - DNA, 20 bp, Artificial Sequence
  Description of Artificial Sequence: Synthetic primer
gcgctgattggcacacctga

SEQ ID NO: 103 - DNA, 28 bp, Artificial Sequence
  Description of Artificial Sequence: Synthetic primer
attgaaaggttggtgcaacagcatgttg

SEQ ID NO: 104 - DNA, 24 bp, Artificial Sequence
  Description of Artificial Sequence: Synthetic primer
tggtcccgtgatgtcgcgttatac

SEQ ID NO: 105 - DNA, 20 bp, Artificial Sequence
  Description of Artificial Sequence: Synthetic primer
gaactggcgaagaaagtgga

SEQ ID NO: 106 - DNA, 21 bp, Artificial Sequence
  Description of Artificial Sequence: Synthetic primer
tgccgaagaggtgaataacgc

SEQ ID NO: 107 - DNA, 20 bp, Artificial Sequence
  Description of Artificial Sequence: Synthetic primer
atcatgctgccgagcatacg

SEQ ID NO: 108 - DNA, 22 bp, Artificial Sequence
  Description of Artificial Sequence: Synthetic primer
ctccccagtcgatattctcgtg

SEQ ID NO: 109 - DNA, 70 bp, Artificial Sequence
  Description of Artificial Sequence: Synthetic primer
ttaccgctattgctgaaggtcgtcgttaatcacaaagcgggtcgcccttgcatatgaatatcctccttag

SEQ ID NO: 110 - DNA, 75 bp, Artificial Sequence
  Description of Artificial Sequence: Synthetic primer
ttccggttcagatatccgcagcgcaaagctgcggatgatgacgagattactgctgcatatgaatatcctccttag

SEQ ID NO: 111 - DNA, 23 bp, Artificial Sequence
  Description of Artificial Sequence: Synthetic primer
gcaaatagttgtgcagagggcgg

SEQ ID NO: 112 - DNA, 21 bp, Artificial Sequence
  Description of Artificial Sequence: Synthetic primer
ccagtggggagctacattctc

SEQ ID NO: 113 - DNA, 24 bp, Artificial Sequence
  Description of Artificial Sequence: Synthetic primer
cgtcattcagatgctggcgcgatc

SEQ ID NO: 114 - DNA, 17 bp, Artificial Sequence
  Description of Artificial Sequence: Synthetic primer
atgggttttctttccgg

SEQ ID NO: 115 - DNA, 80 bp, Artificial Sequence
  Description of Artificial Sequence: Synthetic primer
caggtttgcggcgtccagcggttatgtaactactattcggcgcgacttacgccgctccccgctcgcgataatgtggtagc

SEQ ID NO: 116 - DNA, 80 bp, Artificial Sequence
  Description of Artificial Sequence: Synthetic primer
aataaaaccaatgatttggctaatgatcacacagtcccaggcagtaagaccgacgtcattctatcatgccataccgcgaa

SEQ ID NO: 117 - DNA, 21 bp, Artificial Sequence
  Description of Artificial Sequence: Synthetic primer
gagataagcctgaaatgtcgc

SEQ ID NO: 118 - DNA, 21 bp, Artificial Sequence
  Description of Artificial Sequence: Synthetic primer
cagtccagttacgctggagtc

SEQ ID NO: 119 - DNA, 26 bp, Artificial Sequence
  Description of Artificial Sequence: Synthetic primer
actgaccatttaaatcatacctgacc

SEQ ID NO: 120 - DNA, 1207 bp, Artificial Sequence
  Description of Artificial Sequence: Synthetic polynucleotide
cagtccagttacgctggagtctgctaaggtgtatggagccgatgttggcccagaatgtccgccagaacttcgaattgctctattcgcgtcgcgagatgctgccgctggtgagtagtcaccgcacccgcatatttgaagcgattatggccggtaagccggaagaagcgcgcgaagcatcgcatcgccatctggcctttatcgaagaaattttgctcgacagaagtcgtgaagagagccgccgtgagcgttctctgcgtcgtctggagcaacgaaagaattagtgtttaaacataacttcgtatagcatacattatacgaagttattgttgacaattaatcatcggcatagtatatcggcatagtataatacgacaaggtgaggaactaaaccatggccaagttgaccagtgccgttccggtgctcaccgcgcgcgacgtcgccggagcggtcgagttctggaccgaccggctcgggttctcccgggacttcgtggaggacgacttcgccggtgtggtccgggacgacgtgaccctgttcatcagcgcggtccaggaccaggtggtgccggacaacaccctggcctgggtgtgggtgcgcggcctggacgagctgtacgccgagtggtcggaggtcgtgtccacgaacttccgggacgcctccgggccggccatgaccgagatcggcgagcagccgtgggggcgggagttcgccctgcgcgacccggccggcaactgcgtgcacttcgtggccgaggagcaggactgaataacttcgtatagcatacattatacgaagttatagatcttaactacttaaaaatttcagttgcttaatcctacaattcttgatataatattctcatagtttgaaagaactattcagatagataaggaataacccatgtcagaacgtttcccaaatgacgtggatccgatcgaaactcgcgactggctccaggcgatcgaatcggtcatccgtgaagaaggtgttgagcgtgctcagtatctgatcgaccaactgcttgctgaagcccgcaaaggcggtgtaaacgtagccgcaggcacaggtatcagcaactacatcaacaccatccccgttgaagaacaaccggagtatccgggtaatctggaactggaacgccgtattcgttcagctatccgctggaacgccatcatgacggactgaccatttaaatcatacctgacc

SEQ ID NO: 121 - DNA, 1290 bp, Artificial Sequence
  Description of Artificial Sequence: Synthetic polynucleotide
cagtccagttacgctggagtcgtaactgtctgcgtcatttttcatatcacattccttaagccaattttaatcctgctcaaatgaccgtctatgcttaaaaaacagccgtatcagcatcattactactgaagcaactgaattgtataagttaatttaatgttaagtagtgattcgtgccggggcgatgtctcgttttacccgaccgtcgaagacaattatcagtctttatccggcgttctaaggtgtttatcccactatcacggctgaatcgttaatattttgcgagttcacgccgaaatactgatttttggcgctagatcagtttaaacataacttcgtatagcatacattatacgaagttattgttgacaattaatcatcggcatagtatatcggcatagtataatacgacaaggtgaggaactaaaccatggccaagcctttgtctcaagaagaatccaccctcattgaaagagcaacggctacaatcaacagcatccccatctctgaagactacagcgtcgccagcgcagctctctctagcgacggccgcatcttcactggtgtcaatgtatatcattttactgggggaccttgtgcagaactcgtggtgctgggcactgctgctgctgcggcagctggcaacctgacttgtatcgtcgcgatcggaaatgagaacaggggcatcttgagcccctgcggacggtgccgacaggtgcttctcgatctgcatcctgggatcaaagccatagtgaaggacagtgatggacagccgacggcagttgggattcgtgaattgctgccctctggttatgtgtgggagggctaaataacttcgtatagcatacattatacgaagttatagatcttaactacttaaaaatttcagttgcttaatcctacaattcttgatataatattctcatagtttgaaagaactattcaaccgatggaagggaatatcatgcgaattggcataccaagagaacggttaaccaatgaaacccgtgttgcagcaacgccaaaaacagtggaacagctgctgaaactgggttttaccgtcgcggtagagagcggcgcgggtcaactggcaagttttgacgataaagcgtttgtgcaagcgggcgctgaaattgtagaagggaatagcgtctggcagtcagagatcattctgaaggtcaatgcgccgttagatgatgaaattgcgttactgaatcctgggacaacgctggtgagttttatctggcctgcgcagaatccggaaactgaccatttaaatcatacctgacc

SEQ ID NO: 122 - DNA, 1210 bp, Artificial Sequence
  Description of Artificial Sequence: Synthetic polynucleotide
cagtccagttacgctggagtcggcactataccagagaatgaacatactggattgctccagtattgtgaatgaacggtaacgcaataaaacatatttactgcaattctttggccggttcttttacgtacagcggaaacctgccgcttaaacggagagtatcgtcgataaaaatccaataaaacgtcagggcaaaagtaagaaacagacaaagcaaaggccgctcaggatatagccagataaatgacggggatcaattggcttacccgcgataaaatgttaccattctgttgcttttatgtatgtttaaacataacttcgtatagcatacattatacgaagttattgttgacaattaatcatcggcatagtatatcggcatagtataatacgacaaggtgaggaactaaaccatggccaagcctttgtctcaagaagaatccaccctcattgaaagagcaacggctacaatcaacagcatccccatctctgaagactacagcgtcgccagcgcagctctctctagcgacggccgcatcttcactggtgtcaatgtatatcattttactgggggaccttgtgcagaactcgtggtgctgggcactgctgctgctgcggcagctggcaacctgacttgtatcgtcgcgatcggaaatgagaacaggggcatcttgagcccctgcggacggtgccgacaggtgcttctcgatctgcatcctgggatcaaagccatagtgaaggacagtgatggacagccgacggcagttgggattcgtgaattgctgccctctggttatgtgtgggagggctaaataacttcgtatagcatacattatacgaagttatagatcttaactacttaaaaatttcagttgcttaatcctacaattcttgatataatattctcatagtttgaaagaactattcaagaacaggtaagccctaccatgccacattcctacgattacgatgccatagtaataggttccggccccggcggcgaaggcgctgcaatgggcctggttaagcaaggtgcgcgcgtcgcagttatcgagcgttatcaaaatgttggcggcggttgcacccactggggcaccatcccgtcgaaagctctccgtcacgccgtcagccgcattatagaattcaatcaaaacccactttacagcgaccattcccgactgctccgcactgaccatttaaatcatacctgacc

SEQ ID NO: 123 - DNA, 1216 bp, Artificial Sequence
  Description of Artificial Sequence: Synthetic polynucleotide
cagtccagttacgctggagtcctctctcgacatatcaattattttcttgccgtggctgaacatggcagcttcacccgtgccgccagtgcgttgcacgtctcccaacctgcgctttcccagcagattcgccagttagaggagagtttaggcgtgccgctgtttgaccgtagcgggcgaacgattcgtctcactgatgcaggagaagtctggcgacagtacgccagccgggcgttacaggaactgggggcgggtaaacgggtttaaactaccgttcgtataatgtatgctatacgaagttatgatatctactacgacactgcatgcatcatcagatcttgttgacaattaatcatcggcatagtatatcggcatagtataatacgacaaggtgaggaactaaaccatggccaagcctttgtctcaagaagaatccaccctcattgaaagagcaacggctacaatcaacagcatccccatctctgaagactacagcgtcgccagcgcagctctctctagcgacggccgcatcttcactggtgtcaatgtatatcattttactgggggaccttgtgcagaactcgtggtgctgggcactgctgctgctgcggcagctggcaacctgacttgtatcgtcgcgatcggaaatgagaacaggggcatcttgagcccctgcggacggtgccgacaggtgcttctcgatctgcatcctgggatcaaagccatagtgaaggacagtgatggacagccgacggcagttgggattcgtgaattgcataacttcgtataatgtatgctatacgaacggtaagatcttaactacttaaaaatttcagttgcttaatcctacaattcttgatataatattctcatagtttgaaagaactattcaaaattaaagaggtatatattaatgaaagagattattgatggattccttaaattccagcgcgaggcatttccgaagcgggaagccttgtttaaacagctggcgacacagcaaagcccgcgcacactttttatctcctgctccgacagccgtctggtccctgagctggtgacgcaacgtgagcctggcgatctgttcgttattcgcaacgcgggcaatatcgtcccttcctacgggccggaacccggtggcgtttctgcttcggtggagtatgccgtcgctgcgcttcgggtatctgacattgactgaccatttaaatcatacctgacc

SEQ ID NO: 124 - DNA, 2172 bp, Artificial Sequence
  Description of Artificial Sequence: Synthetic polynucleotide
atggcaggcgatcacgttctgccgccggtttgggcgaaccagattgtccgtttcgctaaccgctccctggaaggtctggagttcgcgtgcgcgtggaccgcacagctgctgcacagccaacgtcatattaacgaaattacgctgaacattccagccaatattagcgcgaccacgggcgcacgttccgccagcgtcggctgggccgagtccttgattggtctgcacctgggcaaggtggctctgattaccggtggttcggcgggcatcggtggtcaaatcggtcgtctgctggccttgtctggcgcgcgtgtgatgctggccgctcgcgatcgccataaattggaacagatgcaagccatgattcaaagcgaattggcggaggttggttataccgatgtggaggaccgtgtgcacatcgctccgggttgcgatgtgagcagcgaggcgcagctggcagatctggtggaacgtacgctgtccgcattcggtaccgtggattatttgattaataacgccggtattgcgggcgtggaggagatggtgatcgacatgccggtggaaggctggcgtcacaccctgtttgccaacctgatttcgaattattcgctgatgcgcaagttggcgccgctgatgaagaagcaaggtagcggttacatcctgaacgtttcttcctattttggcggtgagaaggacgcggcgattccttatccgaaccgcgccgactacgccgtctccaaggctggccaacgcgcgatggcggaagtgttcgctcgtttcctgggtccagagattcagatcaatgctattgccccaggtccggttgaaggcgaccgcctgcgtggtaccggtgagcgtccgggcctgtttgctcgtcgcgcccgtctgatcttggagaataaacgcctgaacgaattgcacgcggctttgattgctgcggcccgcaccgatgagcgctcgatgcacgagttggttgaattgttgctgccgaacgacgtggccgcgttggagcagaacccagcggcccctaccgcgctgcgtgagctggcacgccgcttccgtagcgaaggtgatccggcggcaagctcctcgtccgccttgctgaatcgctccatcgctgccaagctgttggctcgcttgcataacggtggctatgtgctgccggcggatatttttgcaaatctgcctaatccgccggacccgttctttacccgtgcgcaaattgaccgcgaagctcgcaaggtgcgtgatggtattatgggtatgctgtatctgcagcgtatgccaaccgagtttgacgtcgctatggcaaccgtgtactatctggccgatcgtaacgtgagcggcgaaactttccatccgtctggtggtttgcgctacgagcgtaccccgaccggtggcgagctgttcggcctgccatcgccggaacgtctggcggagctggttggtagcacggtgtacctgatcggtgaacacctgaccgagcacctgaacctgctggctcgtgcctatttggagcgctacggtgcccgtcaagtggtgatgattgttgagacggaaaccggtgcggaaaccatgcgtcgtctgttgcatgatcacgtcgaggcaggtcgcctgatgactattgtggcaggtgatcagattgaggcagcgattgaccaagcgatcacgcgctatggccgtccgggtccggtggtgtgcactccattccgtccactgccaaccgttccgctggtcggtcgtaaagactccgattggagcaccgttttgagcgaggcggaatttgcggaactgtgtgagcatcagctgacccaccatttccgtgttgctcgtaagatcgccttgtcggatggcgcgtcgctggcgttggttaccccggaaacgactgcgactagcaccacggagcaatttgctctggcgaacttcatcaagaccaccctgcacgcgttcaccgcgaccatcggtgttgagtcggagcgcaccgcgcaacgtattctgattaaccaggttgatctgacgcgccgcgcccgtgcggaagagccgcgtgacccgcacgagcgtcagcaggaattggaacgcttcattgaagccgttctgctggttaccgctccgctgcctcctgaggcagacacgcgctacgcaggccgtattcaccgcggtcgtgcgattaccgtc

SEQ ID NO: 125 - DNA, 2568 bp, Artificial Sequence
  Description of Artificial Sequence: Synthetic polynucleotide
atggctttgccgttggacccacgtgacccggccaccattgatgcggttttcgattggggcgcaggcgagaatacgggtggcatccatgcggcggtcattctgccggcaacctcccacgaaccggctccgtgcgtgattgaagtcgatgacgaacgcgtcctgaatttcctggccgatgaaattaccggcaccatcgttattgcgagccgtttggcgcgctattggcaatcccaacgcctgaccccgggtgcccgtgcccgcggtccgcgtgttatctttctgagcaacggtgccgatcaaaatggtaatgtttacggtcgtattcaatctgcggcgatcggtcaattgattcgcgtttggcgtcacgaggcggagttggactatcaacgtgcatccgccgcaggcgatcacgttctgccgccggtttgggcgaaccagattgtccgtttcgctaaccgctccctggaaggtctggagttcgcgtgcgcgtggaccgcacagctgctgcacagccaacgtcatattaacgaaattacgctgaacattccagccaatattagcgcgaccacgggcgcacgttccgccagcgtcggctgggccgagtccttgattggtctgcacctgggcaaggtggctctgattaccggtggttcggcgggcatcggtggtcaaatcggtcgtctgctggccttgtctggcgcgcgtgtgatgctggccgctcgcgatcgccataaattggaacagatgcaagccatgattcaaagcgaattggcggaggttggttataccgatgtggaggaccgtgtgcacatcgctccgggttgcgatgtgagcagcgaggcgcagctggcagatctggtggaacgtacgctgtccgcattcggtaccgtggattatttgattaataacgccggtattgcgggcgtggaggagatggtgatcgacatgccggtggaaggctggcgtcacaccctgtttgccaacctgatttcgaattattcgctgatgcgcaagttggcgccgctgatgaagaagcaaggtagcggttacatcctgaacgtttcttcctattttggcggtgagaaggacgcggcgattccttatccgaaccgcgccgactacgccgtctccaaggctggccaacgcgcgatggcggaagtgttcgctcgtttcctgggtccagagattcagatcaatgctattgccccaggtccggttgaaggcgaccgcctgcgtggtaccggtgagcgtccgggcctgtttgctcgtcgcgcccgtctgatcttggagaataaacgcctgaacgaattgcacgcggctttgattgctgcggcccgcaccgatgagcgctcgatgcacgagttggttgaattgttgctgccgaacgacgtggccgcgttggagcagaacccagcggcccctaccgcgctgcgtgagctggcacgccgcttccgtagcgaaggtgatccggcggcaagctcctcgtccgccttgctgaatcgctccatcgctgccaagctgttggctcgcttgcataacggtggctatgtgctgccggcggatatttttgcaaatctgcctaatccgccggacccgttctttacccgtgcgcaaattgaccgcgaagctcgcaaggtgcgtgatggtattatgggtatgctgtatctgcagcgtatgccaaccgagtttgacgtcgctatggcaaccgtgtactatctggccgatcgtaacgtgagcggcgaaactttccatccgtctggtggtttgcgctacgagcgtaccccgaccggtggcgagctgttcggcctgccatcgccggaacgtctggcggagctggttggtagcacggtgtacctgatcggtgaacacctgaccgagcacctgaacctgctggctcgtgcctatttggagcgctacggtgcccgtcaagtggtgatgattgttgagacggaaaccggtgcggaaaccatgcgtcgtctgttgcatgatcacgtcgaggcaggtcgcctgatgactattgtggcaggtgatcagattgaggcagcgattgaccaagcgatcacgcgctatggccgtccgggtccggtggtgtgcactccattccgtccactgccaaccgttccgctggtcggtcgtaaagactccgattggagcaccgttttgagcgaggcggaatttgcggaactgtgtgagcatcagctgacccaccatttccgtgttgctcgtaagatcgccttgtcggatggcgcgtcgctggcgttggttaccccggaaacgactgcgactagcaccacggagcaatttgctctggcgaacttcatcaagaccaccctgcacgcgttcaccgcgaccatcggtgttgagtcggagcgcaccgcgcaacgtattctgattaaccaggttgatctgacgcgccgcgcccgtgcggaagagccgcgtgacccgcacgagcgtcagcaggaattggaacgcttcattgaagccgttctgctggttaccgctccgctgcctcctgaggcagacacgcgctacgcaggccgtattcaccgcggtcgtgcgattaccgtc

SEQ ID NO: 126 - DNA, 3135 bp, Artificial Sequence
  Description of Artificial Sequence: Synthetic polynucleotide
atggcgctgaacgctttgtcccagctggctgcccgcgagctgggcgctcgtggcatccgcgttaacactattttcccaggtcctattgagtccgaccgcatccgtaccgtgtttcaacgtatggatcaactgaagggtcgcccggagggcgacaccgcccatcactttttgaacaccatgcgcctgtgccgcgcaaacgaccaaggcgctttggaacgccgctttccgtccgttggcgatgttgctgatgcggctgtgtttctggcttctgctgagagcgcggcactgtcgggtgagacgattgaggtcacccacggtatggaactgccggcgtgtagcgaaacctccttgttggcgcgtaccgatctgcgtaccatcgacgcgagcggtcgcactaccctgatttgcgctggcgatcaaattgaagaagttatggccctgacgggcatgctgcgtacgtgcggtagcgaagtgattatcggcttccgttctgcggctgccctggcgcaatttgagcaggcagtgaatgaatctcgccgtctggcaggtgcggatttcaccccgccgatcgctttgccgttggacccacgtgacccggccaccattgatgcggttttcgattggggcgcaggcgagaatacgggtggcatccatgcggcggtcattctgccggcaacctcccacgaaccggctccgtgcgtgattgaagtcgatgacgaacgcgtcctgaatttcctggccgatgaaattaccggcaccatcgttattgcgagccgtttggcgcgctattggcaatcccaacgcctgaccccgggtgcccgtgcccgcggtccgcgtgttatctttctgagcaacggtgccgatcaaaatggtaatgtttacggtcgtattcaatctgcggcgatcggtcaattgattcgcgtttggcgtcacgaggcggagttggactatcaacgtgcatccgccgcaggcgatcacgttctgccgccggtttgggcgaaccagattgtccgtttcgctaaccgctccctggaaggtctggagttcgcgtgcgcgtggaccgcacagctgctgcacagccaacgtcatattaacgaaattacgctgaacattccagccaatattagcgcgaccacgggcgcacgttccgccagcgtcggctgggccgagtccttgattggtctgcacctgggcaaggtggctctgattaccggtggttcggcgggcatcggtggtcaaatcggtcgtctgctggccttgtctggcgcgcgtgtgatgctggccgctcgcgatcgccataaattggaacagatgcaagccatgattcaaagcgaattggcggaggttggttataccgatgtggaggaccgtgtgcacatcgctccgggttgcgatgtgagcagcgaggcgcagctggcagatctggtggaacgtacgctgtccgcattcggtaccgtggattatttgattaataacgccggtattgcgggcgtggaggagatggtgatcgacatgccggtggaaggctggcgtcacaccctgtttgccaacctgatttcgaattattcgctgatgcgcaagttggcgccgctgatgaagaagcaaggtagcggttacatcctgaacgtttcttcctattttggcggtgagaaggacgcggcgattccttatccgaaccgcgccgactacgccgtctccaaggctggccaacgcgcgatggcggaagtgttcgctcgtttcctgggtccagagattcagatcaatgctattgccccaggtccggttgaaggcgaccgcctgcgtggtaccggtgagcgtccgggcctgtttgctcgtcgcgcccgtctgatcttggagaataaacgcctgaacgaattgcacgcggctttgattgctgcggcccgcaccgatgagcgctcgatgcacgagttggttgaattgttgctgccgaacgacgtggccgcgttggagcagaacccagcggcccctaccgcgctgcgtgagctggcacgccgcttccgtagcgaaggtgatccggcggcaagctcctcgtccgccttgctgaatcgctccatcgctgccaagctgttggctcgcttgcataacggtggctatgtgctgccggcggatatttttgcaaatctgcctaatccgccggacccgttctttacccgtgcgcaaattgaccgcgaagctcgcaaggtgcgtgatggtattatgggtatgctgtatctgcagcgtatgccaaccgagtttgacgtcgctatggcaaccgtgtactatctggccgatcgtaacgtgagcggcgaaactttccatccgtctggtggtttgcgctacgagcgtaccccgaccggtggcgagctgttcggcctgccatcgccggaacgtctggcggagctggttggtagcacggtgtacctgatcggtgaacacctgaccgagcacctgaacctgctggctcgtgcctatttggagcgctacggtgcccgtcaagtggtgatgattgttgagacggaaaccggtgcggaaaccatgcgtcgtctgttgcatgatcacgtcgaggcaggtcgcctgatgactattgtggcaggtgatcagattgaggcagcgattgaccaagcgatcacgcgctatggccgtccgggtccggtggtgtgcactccattccgtccactgccaaccgttccgctggtcggtcgtaaagactccgattggagcaccgttttgagcgaggcggaatttgcggaactgtgtgagcatcagctgacccaccatttccgtgttgctcgtaagatcgccttgtcggatggcgcgtcgctggcgttggttaccccggaaacgactgcgactagcaccacggagcaatttgctctggcgaacttcatcaagaccaccctgcacgcgttcaccgcgaccatcggtgttgagtcggagcgcaccgcgcaacgtattctgattaaccaggttgatctgacgcgccgcgcccgtgcggaagagccgcgtgacccgcacgagcgtcagcaggaattggaacgcttcattgaagccgttctgctggttaccgctccgctgcctcctgaggcagacacgcgctacgcaggccgtattcaccgcggtcgtgcgattaccgtc

SEQ ID NO: 127 - protein, 1217 aa, Erythrobacter sp.; identical to SEQ ID NO: 46
  Erythrobacter sp. NAP1

SEQ ID NO: 128 - DNA, 7999 bp, Artificial Sequence
  Description of Artificial Sequence: Synthetic polynucleotide
gtttgacagcttatcatcgactgcacggtgcaccaatgcttctggcgtcaggcagccatcggaagctgtggtatggctgtgcaggtcgtaaatcactgcataattcgtgtcgctcaaggcgcactcccgttctggataatgttttttgcgccgacatcataacggttctggcaaatattctgaaatgagctgttgacaattaatcatccggctcgtataatgtgtggaattgtgagcggataacaatttcacacaggaaacagcgccgctgagaaaaagcgaagcggcactgctctttaacaatttatcagacaatctgtgtgggcactcgaccggaattatcgattaactttattattaaaaattaaagaggtatatattaatgtatcgattaaataaggaggaataaaccatgagcaaagaaggtaatgcggccaaaggccgcctggagggtaaagtggccctgatcaccggtgcagctggcaacctgggtaatgaaattagccgcgcgtttgcccgtgagggtgcgttcgtggttatgaccggccgcacggaagaacgtatctctgcggcccgcgaacagctgattgcggataccggtgtcgccccggaacgtatcgacacggcggtgctggatggcggtaacccggactctattcgtgcagctatggccaaactgcgcaaagaatatggccgtattgatatcctgattaacaatgcaggttcagcaggtccgaaacagccgctgcataatgttccgctgtcgccgcaagaaatggaagcatgcggtgataccgaaacggtgcgcgacgcgatgctgaacatcctgggcgtgacctggaatatggctcgtattgttgcgccgatgatgccggtgggcggtgcaatggttaatatcagcaccatttttagccacacgcgctattacggccgtaccgcgtatgtcgtgccgaaagcggccctgaacgcactgagcaatcagctggcttctgaactgggcccgcgtggtattcgcgttaacaccgtctttccgggtccgatcgaaagtgatcgtattcgcacggtgttcgcagctatggatgaagttcagtcccaaccgaaagacaccacggcgaattactttaccggtcgtatggcactgacgcgtagcgtcaacggcaaagtggatggtaaaccgctgccgaatccgaaagacatcgcgggtacctgtctgttcctggccagtgaagaagcggccggcattgccggtgaagaagttgatgtcacccatggcctgtccgcaaaccgcacgtctgctagtacctatatgacgcgcccgtctatgcgtagtctggatggcgcgggtctgaacatcttcatcgtttcaggtgaaaactgggatgacgccctggtcgcagctcacaccctgatcggctcgggtgcaaaagtgcgcctgggcctggcacgtaacgctgatgttgcacaggctaatgcgcgtctgaaagcgcaaggcattggtgaagaactgaccgttacgcgttttaatcgcgccgaaccggacgcaatggaagatgctctggcggccttcagtggcgacgttgatggtgcgatcaccggcgccattatcctgccggtcaaaccgagcggtcattttacgggctctctgctggcagctgatgacgataccgtgacgaaattcatggataccgaactggtcggtgccattgcagtgtcccgttcactggcacgttactggcacggtcgtgaagatttgcagagcccgccgcgttgcgtttttatgaccaacccgggtgacccgctgggcaattccttcgcgtcagtgctgtcggccggtatcacgcagctgatccgtatttggcgcgatgaagaacgcgttcaagcaggcaacggtagtaccgaacatgcggtctggtccaatcagattgtgcgccacaccaacacggaagatgaaaatacccgttttgcaagcggccatgctacgcgcgtgctgttccgtgaacaacacatcgccgaaattgatctgaaactgccggcaaacatcagtgaagaaaccggttcccgcaaagcaatggtgggctttgctgaaaatattaccggtctgcatctgggcaaagttgcattcatcacgggcggtagtgctggtattggcggtcaggtggcacgtctgctggctctggcaggtgccaaagtgatgatggttgcacgtcgcgaatccgaactggtcgcggcacgtgatcgcatcgtgggtgaactgcaagacattggctttgcgggtgttgaacgtcgcgtcaaatatatggcggacattgatgtcagtgattttgcctccctggacaaagcggtggatgccaccctggaagaattcggccgtatcgactacctgattaacaatgcgggcgttgcaggtgctgaagacatggtcatcgatatggaaccggaagcctggcgcttcaccctggatgcaaacctgattagcaattatcatctgatgcagcgtgttgtcccgctgatgaaagaacaaggctctggttatgtcctgaacgtgagctcttactttggcggtgaaaaattcctggcggttgcctatccgaatcgcgccgattacggtctgagcaaagcgggccagcgtgccatggtggaagcattttctccgttcctgggcccggaagttcaatgcaacgcaattgctccgggtccggtcgacggtgatcgtctgtctggtaccggcggtaaaccgggcctgtttcagcgtcgcgcgaaactgatcctggaaaacaaacgcctgaatgctgtgtatagtgcggttatccatgccattcgtgaaggcggtgatgcagctaaaattctgacccgtctgagtcgcaattcgaccagcacgctgtcccacgatgcagaagcaccggaagaactgcgtaaactggcactggattttgctagccagggcgacggtctgtgtacctgggatcaatacctgctgacggacgcaatggctcagcgtctgctggtgcgtctgcaactgggcggttttctgctgggttcaaacgaatgggcctcgctgagttcctcagaacagacctggctgaaactgtcaccgccggacgataaaccgttcctgccggcggcccaagttgataaagtcgcgaatggcgtcggtaaaggcgtgatttcgcagctgcatctgggtgcaatgccgaccgaagccgaagttgcgcaagccacggtctttttcctggcagatcgcgctgtgtcaggtgaaacctttatgccgtcgggcggtctgcgtgttgaacgctcaaacaccgaacgcgaaatgttcggctcgccgaaacaggaacgtatcgataaaatgaaaggtaaaaccgtctggattatcggcgaacacctgagtgactatgtggcagctacgatcgaagaactggtgtccggttgcggcgttgcgaaagtggttctgattgccaaagataaaagcggtgaaaaagcggttcgtgaccagctgccgaatgacctgtctaaagatgcactggaagtgctgatcgctggtgatggcctggaagaagcgatggacgaagccctgggccattggggtaaaccgaccacggtgctgtcaatgccgggcgaaccgctgccggatcacctgtttgaaggcggtaacccgctgtcgaccaaagacttcgcacatatggtggaagctaatattacccgtcactatcgcgttacgcgtaaagcgtccctgtacgatggttgtcaggtcgtgctggttagcccggatgtcccgtacggttctgacggtccgggtgttgcactggctaactttgtcaaaacctctctgcatgcgttcaccgccacggtggcagttgaaaatgaacgcctggttcacgatgtcccggtgaaccagatcaatctgacgcgtcgcgtgtcgagcgaagaaccgcgtgacgcagatgaacatgctgaagaactgcgtcgctttacccgtgcagtgctgctggttggtgcaccgctgccggacgcacaggattcacgttatcgctcgaaaatttaccgcggcaccagcatgacggtgtaataaccgcggcacgagcatgacggtccatcaccatcatcactaatagagatctgcagctggtaccatatgggaattcgaagcttggctgttttggcggatgagagaagattttcagcctgatacagattaaatcagaacgcagaagcggtctgataaaacagaatttgcctggcggcagtagcgcggtggtcccacctgaccccatgccgaactcagaagtgaaacgccgtagcgccgatggtagtgtggggtctccccatgcgagagtagggaactgccaggcatcaaataaaacgaaaggctcagtcgaaagactgggcctttcgttttatctgttgtttgtcggtgaacgctctcctgagtaggacaaatccgccgggagcggatttgaacgttgcgaagcaacggcccggagggtggcgggcaggacgcccgccataaactgccaggcatcaaattaagcagaaggccatcctgacggatggcctttttgcgtttctacaaactctttttgtttatttttctaaatacattcaaatatgtatccgctcatgagacaataaccctgataaatgcttcaataatattgaaaaaggaagagtatgagtattcaacatttccgtgtcgcccttattcccttttttgcggcattttgccttcctgtttttgctcacccagaaacgctggtgaaagtaaaagatgctgaagatcagttgggtgcacgagtgggttacatcgaactggatctcaacagcggtaagatccttgagagttttcgccccgaagaacgttttccaatgatgagcacttttaaagttctgctatgtggcgcggtattatcccgtgttgacgccgggcaagagcaactcggtcgccgcatacactattctcagaatgacttggttgagtactcaccagtcacagaaaagcatcttacggatggcatgacagtaagagaattatgcagtgctgccataaccatgagtgataacactgcggccaacttacttctgacaacgatcggaggaccgaaggagctaaccgcttttttgcacaacatgggggatcatgtaactcgccttgatcgttgggaaccggagctgaatgaagccataccaaacgacgagcgtgacaccacgatgcctgtagcaatggcaacaacgttgcgcaaactattaactggcgaactacttactctagcttcccggcaacaattaatagactggatggaggcggataaagttgcaggaccacttctgcgctcggcccttccggctggctggtttattgctgataaatctggagccggtgagcgtgggtctcgcggtatcattgcagcactggggccagatggtaagccctcccgtatcgtagttatctacacgacggggagtcaggcaactatggatgaacgaaatagacagatcgctgagataggtgcctcactgattaagcattggtaactgtcagaccaagtttactcatatatactttagattgatttaaaacttcatttttaatttaaaaggatctaggtgaagatcctttttgataatctcatgaccaaaatcccttaacgtgagttttcgttccactgagcgtcagaccccgtagaaaagatcaaaggatcttcttgagatcctttttttctgcgcgtaatctgctgcttgcaaacaaaaaaaccaccgctaccagcggtggtttgtttgccggatcaagagctaccaactctttttccgaaggtaactggcttcagcagagcgcagataccaaatactgtccttctagtgtagccgtagttaggccaccacttcaagaactctgtagcaccgcctacatacctcgctctgctaatcctgttaccagtggctgctgccagtggcgataagtcgtgtcttaccgggttggactcaagacgatagttaccggataaggcgcagcggtcgggctgaacggggggttcgtgcacacagcccagcttggagcgaacgacctacaccgaactgagatacctacagcgtgagctatgagaaagcgccacgcttcccgaagggagaaaggcggacaggtatccggtaagcggcagggtcggaacaggagagcgcacgagggagcttccagggggaaacgcctggtatctttatagtcctgtcgggtttcgccacctctgacttgagcgtcgatttttgtgatgctcgtcaggggggcggagcctatggaaaaacgccagcaacgcggcctttttacggttcctggccttttgctggccttttgctcacatgttctttcctgcgttatcccctgattctgtggataaccgtattaccgcctttgagtgagctgataccgctcgccgcagccgaacgaccgagcgcagcgagtcagtgagcgaggaagcggaagagcgcctgatgcggtattttctccttacgcatctgtgcggtatttcacaccgcatatggtgcactctcagtacaatctgctctgatgccgcatagttaagccagtatacactccgctatcgctacgtgactgggtcatggctgcgccccgacacccgccaacacccgctgacgcgccctgacgggcttgtctgctcccggcatccgcttacagacaagctgtgaccgtctccgggagctgcatgtgtcagaggttttcaccgtcatcaccgaaacgcgcgaggcagcagatcaattcgcgcgcgaaggcgaagcggcatgcatttacgttgacaccatcgaatggtgcaaaacctttcgcggtatggcatgatagcgcccggaagagagtcaattcagggtggtgaatgtgaaaccagtaacgttatacgatgtcgcagagtatgccggtgtctcttatcagaccgtttcccgcgtggtgaaccaggccagccacgtttctgcgaaaacgcgggaaaaagtggaagcggcgatggcggagctgaattacattcccaaccgcgtggcacaacaactggcgggcaaacagtcgttgctgattggcgttgccacctccagtctggccctgcacgcgccgtcgcaaattgtcgcggcgattaaatctcgcgccgatcaactgggtgccagcgtggtggtgtcgatggtagaacgaagcggcgtcgaagcctgtaaagcggcggtgcacaatcttctcgcgcaacgcgtcagtgggctgatcattaactatccgctggatgaccaggatgccattgctgtggaagctgcctgcactaatgttccggcgttatttcttgatgtctctgaccagacacccatcaacagtattattttctcccatgaagacggtacgcgactgggcgtggagcatctggtcgcattgggtcaccagcaaatcgcgctgttagcgggcccattaagttctgtctcggcgcgtctgcgtctggctggctggcataaatatctcactcgcaatcaaattcagccgatagcggaacgggaaggcgactggagtgccatgtccggttttcaacaaaccatgcaaatgctgaatgagggcatcgttcccactgcgatgctggttgccaacgatcagatggcgctgggcgcaatgcgcgccattaccgagtccgggctgcgcgttggtgcggatatctcggtagtgggatacgacgataccgaagacagctcatgttatatcccgccgtcaaccaccatcaaacaggattttcgcctgctggggcaaaccagcgtggaccgcttgctgcaactctctcagggccaggcggtgaagggcaatcagctgttgcccgtctcactggtgaaaagaaaaaccaccctggcgcccaatacgcaaaccgcctctccccgcgcgttggccgattcattaatgcagctggcacgacaggtttcccgactggaaagcgggcagtgagcgcaacgcaattaatgtgagttagcgcgaattgatctg

SEQ ID NO: 129 - DNA, 7837 bp, Artificial Sequence
  Description of Artificial Sequence: Synthetic polynucleotide
catggctttgccgttggacccacgtgacccggccaccattgatgcggttttcgattggggcgcaggcgagaatacgggtggcatccatgcggcggtcattctgccggcaacctcccacgaaccggctccgtgcgtgattgaagtcgatgacgaacgcgtcctgaatttcctggccgatgaaattaccggcaccatcgttattgcgagccgtttggcgcgctattggcaatcccaacgcctgaccccgggtgcccgtgcccgcggtccgcgtgttatctttctgagcaacggtgccgatcaaaatggtaatgtttacggtcgtattcaatctgcggcgatcggtcaattgattcgcgtttggcgtcacgaggcggagttggactatcaacgtgcatccgccgcaggcgatcacgttctgccgccggtttgggcgaaccagattgtccgtttcgctaaccgctccctggaaggtctggagttcgcgtgcgcgtggaccgcacagctgctgcacagccaacgtcatattaacgaaattacgctgaacattccagccaatattagcgcgaccacgggcgcacgttccgccagcgtcggctgggccgagtccttgattggtctgcacctgggcaaggtggctctgattaccggtggttcggcgggcatcggtggtcaaatcggtcgtctgctggccttgtctggcgcgcgtgtgatgctggccgctcgcgatcgccataaattggaacagatgcaagccatgattcaaagcgaattggcggaggttggttataccgatgtggaggaccgtgtgcacatcgctccgggttgcgatgtgagcagcgaggcgcagctggcagatctggtggaacgtacgctgtccgcattcggtaccgtggattatttgattaataacgccggtattgcgggcgtggaggagatggtgatcgacatgccggtggaaggctggcgtcacaccctgtttgccaacctgatttcgaattattcgctgatgcgcaagttggcgccgctgatgaagaagcaaggtagcggttacatcctgaacgtttcttcctattttggcggtgagaaggacgcggcgattccttatccgaaccgcgccgactacgccgtctccaaggctggccaacgcgcgatggcggaagtgttcgctcgtttcctgggtccagagattcagatcaatgctattgccccaggtccggttgaaggcgaccgcctgcgtggtaccggtgagcgtccgggcctgtttgctcgtcgcgcccgtctgatcttggagaataaacgcctgaacgaattgcacgcggctttgattgctgcggcccgcaccgatgagcgctcgatgcacgagttggttgaattgttgctgccgaacgacgtggccgcgttggagcagaacccagcggcccctaccgcgctgcgtgagctggcacgccgcttccgtagcgaaggtgatccggcggcaagctcctcgtccgccttgctgaatcgctccatcgctgccaagctgttggctcgcttgcataacggtggctatgtgctgccggcggatatttttgcaaatctgcctaatccgccggacccgttctttacccgtgcgcaaattgaccgcgaagctcgcaaggtgcgtgatggtattatgggtatgctgtatctgcagcgtatgccaaccgagtttgacgtcgctatggcaaccgtgtactatctggccgatcgtaacgtgagcggcgaaactttccatccgtctggtggtttgcgctacgagcgtaccccgaccggtggcgagctgttcggcctgccatcgccggaacgtctggcggagctggttggtagcacggtgtacctgatcggtgaacacctgaccgagcacctgaacctgctggctcgtgcctatttggagcgctacggtgcccgtcaagtggtgatgattgttgagacggaaaccggtgcggaaaccatgcgtcgtctgttgcatgatcacgtcgaggcaggtcgcctgatgactattgtggcaggtgatcagattgaggcagcgattgaccaagcgatcacgcgctatggccgtccgggtccggtggtgtgcactccattccgtccactgccaaccgttccgctggtcggtcgtaaagactccgattggagcaccgttttgagcgaggcggaatttgcggaactgtgtgagcatcagctgacccaccatttccgtgttgctcgtaagatcgccttgtcggatggcgcgtcgctggcgttggttaccccggaaacgactgcgactagcaccacggagcaatttgctctggcgaacttcatcaagaccaccctgcacgcgttcaccgcgaccatcggtgttgagtcggagcgcaccgcgcaacgtattctgattaaccaggttgatctgacgcgccgcgcccgtgcggaagagccgcgtgacccgcacgagcgtcagcaggaattggaacgcttcattgaagccgttctgctggttaccgctccgctgcctcctgaggcagacacgcgctacgcaggccgtattcaccgcggtcgtgcgattaccgtctaatagaagcttggctgttttggcggatgagagaagattttcagcctgatacagattaaatcagaacgcagaagcggtctgataaaacagaatttgcctggcggcagtagcgcggtggtcccacctgaccccatgccgaactcagaagtgaaacgccgtagcgccgatggtagtgtggggtctccccatctgtggtatggctgtgcaggtcgtaaatcactgcataattcgtgtcgctcaaggcgcactcccgttctggataatgttttttgcgccgacatcataacggttctggcaaatattctgaaatgagctgttgacaattaatcatccggctcgtataatgtgtggaattgtgagcggataacaatttcacacaggaaacagcgccgctgagaaaaagcgaagcggcactgctctttaacaatttatcagacaatctgtgtgggcactcgaccggaattatcgattaactttattattaaaaattaaagaggtatatattaatgtatcgattaaataaggaggaataaaccatggtcgttttagtaactggagcaacggcaggttttggtgaatgcattactcgtcgttttattcaacaagggcataaagttatcgccactggccgtcgccaggaacggttgcaggagttaaaagacgaactgggagataatctgtatatcgcccaactggacgttcgcaaccgcgccgctattgaagagatgctggcatcgcttcctgccgagtggtgcaatattgatatcctggtaaataatgccggcctggcgttgggcatggagcctgcgcataaagccagcgttgaagactgggaaacgatgattgataccaacaacaaaggcctggtatatatgacgcgcgccgtcttaccgggtatggttgaacgtaatcatggtcatattattaacattggctcaacggcaggtagctggccgtatgccggtggtaacgtttacggtgcgacgaaagcgtttgttcgtcagtttagcctgaatctgcgtacggatctgcatggtacggcggtgcgcgtcaccgacatcgaaccgggtctggtgggtggtaccgagttttccaatgtccgctttaaaggcgatgacggtaaagcagaaaaaacctatcaaaataccgttgcattgacgccagaagatgtcagcgaagccgtctggtgggtgtcaacgctgcctgctcacgtcaatatcaataccctggaaatgatgccggttacccaaagctatgccggactgaatgtccaccgtcagtaaggaggcggtatcattgcagcactggggccagatggtaagccctcccgtatcgtagttatctacacgacgggattagaaaaactcatcgagcatcaaatgaaactgcaatttattcatatcaggattatcaataccatatttttgaaaaagccgtttctgtaatgaaggagaaaactcaccgaggcagttccataggatggcaagatcctggtatcggtctgcgattccgactcgtccaacatcaatacaacctattaatttcccctcgtcaaaaataaggttatcaagtgagaaatcaccatgagtgacgactgaatccggtgagaatggcaaaagcttatgcatttctttccagacttgttcaacaggccagccattacgctcgtcatcaaaatcactcgcatcaaccaaaccgttattcattcgtgattgcgcctgagcgagacgaaatacgcgatcgctgttaaaaggacaattacaaacaggaatcgaatgcaaccggcgcaggaacactgccagcgcatcaacaatattttcacctgaatcaggatattcttctaatacctggaatgctgttttcccggggatcgcagtggtgagtaaccatgcatcatcaggagtacggataaaatgcttgatggtcggaagaggcataaattccgtcagccagtttagtctgaccatctcatctgtaacatcattggcaacgctacctttgccatgtttcagaaacaactctggcgcatcgggcttcccatacaatcgatagattgtcgcacctgattgcccgacattatcgcgagcccatttatacccatataaatcagcatccatgttggaatttaatcgcggcctcgagcaagacgtttcccgttgaatatggctcataacaccccttgtattactgtttatgtaagcagacagttttattgttcatgatgatatatttttatcttgtgcaatgtaacatcagagattttgagacacaacgtggctttgttgaataaatcgaacttttgctgagttgaagggagtcaggcaactatggatgaacgaaatagacagatcgctgagataggtgcctcactgattaagcattggtaactgtcagaccaagtttactcatatatactttagattgatttaaaacttcatttttaatttaaaaggatctaggtgaagatcctttttgataatctcatgaccaaaatcccttaacgtgagttttcgttccactgagcgtcagaccccgtagaaaagatcaaaggatcttcttgagatcctttttttctgcgcgtaatctgctgcttgcaaacaaaaaaaccaccgctaccagcggtggtttgtttgccggatcaagagctaccaactctttttccgaaggtaactggcttcagcagagcgcagataccaaatactgtccttctagtgtagccgtagttaggccaccacttcaagaactctgtagcaccgcctacatacctcgctctgctaatcctgttaccagtggctgctgccagtggcgataagtcgtgtcttaccgggttggactcaagacgatagttaccggataaggcgcagcggtcgggctgaacggggggttcgtgcacacagcccagcttggagcgaacgacctacaccgaactgagatacctacagcgtgagctatgagaaagcgccacgcttcccgaagggagaaaggcggacaggtatccggtaagcggcagggtcggaacaggagagcgcacgagggagcttccagggggaaacgcctggtatctttatagtcctgtcgggtttcgccacctctgacttgagcgtcgatttttgtgatgctcgtcaggggggcggagcctatggaaaaacgccagcaacgcggcctttttacggttcctggccttttgctggccttttgctcacatgttctttcctgcgttatcccctgattctgtggataaccgtattaccgcctttgagtgagctgataccgctcgccgcagccgaacgaccgagcgcagcgagtcagtgagcgaggaagcggaagagcgcctgatgcggtattttctccttacgcatctgtgcggtatttcacaccgcatatggtgcactctcagtacaatctgctctgatgccgcatagttaagccagtatacactccgctatcgctacgtgactgggtcatggctgcgccccgacacccgccaacacccgctgacgcgccctgacgggcttgtctgctcccggcatccgcttacagacaagctgtgaccgtctccgggagctgcatgtgtcagaggttttcaccgtcatcaccgaaacgcgcgaggcagcagatcaattcgcgcgcgaaggcgaagcggcatgcatttacgttgacaccatcgaatggtgcaaaacctttcgcggtatggcatgatagcgcccggaagagagtcaattcagggtggtgaatgtgaaaccagtaacgttatacgatgtcgcagagtatgccggtgtctcttatcagaccgtttcccgcgtggtgaaccaggccagccacgtttctgcgaaaacgcgggaaaaagtggaagcggcgatggcggagctgaattacattcccaaccgcgtggcacaacaactggcgggcaaacagtcgttgctgattggcgttgccacctccagtctggccctgcacgcgccgtcgcaaattgtcgcggcgattaaatctcgcgccgatcaactgggtgccagcgtggtggtgtcgatggtagaacgaagcggcgtcgaagcctgtaaagcggcggtgcacaatcttctcgcgcaacgcgtcagtgggctgatcattaactatccgctggatgaccaggatgccattgctgtggaagctgcctgcactaatgttccggcgttatttcttgatgtctctgaccagacacccatcaacagtattattttctcccatgaagacggtacgcgactgggcgtggagcatctggtcgcattgggtcaccagcaaatcgcgctgttagcgggcccattaagttctgtctcggcgcgtctgcgtctggctggctggcataaatatctcactcgcaatcaaattcagccgatagcggaacgggaaggcgactggagtgccatgtccggttttcaacaaaccatgcaaatgctgaatgagggcatcgttcccactgcgatgctggttgccaacgatcagatggcgctgggcgcaatgcgcgccattaccgagtccgggctgcgcgttggtgcggatatctcggtagtgggatacgacgataccgaagacagctcatgttatatcccgccgtcaaccaccatcaaacaggattttcgcctgctggggcaaaccagcgtggaccgcttgctgcaactctctcagggccaggcggtgaagggcaatcagctgttgcccgtctcactggtgaaaagaaaaaccaccctggcgcccaatacgcaaaccgcctctccccgcgcgttggccgattcattaatgcagctggcacgacaggtttcccgactggaaagcgggcagtgagcgcaacgcaattaatgtgagttagcgcgaattgatctggtttgacagcttatcatcgactgcacggtgcaccaatgcttctggcgtcaggcagccatcggaagctgtggtatggctgtgcaggtcgtaaatcactgcataattcgtgtcgctcaaggcgcactcccgttctggataatgttttttgcgccgacatcataacggttctggcaaatattctgaaatgagctgttgacaattaatcatccggctcgtataatgtgtggaattgtgagcggataacaatttcacacaggaaacagcgccgctgagaaaaagcgaagcggcactgctctttaacaatttatcagacaatctgtgtgggcactcgaccggaattatcgattaactttattattaaaaattaaagaggtatatattaatgtatcgattaaataaggaggaataaac

SEQ ID NO: 130 - DNA, 7946 bp, Artificial Sequence
  Description of Artificial Sequence: Synthetic polynucleotide
gtttgacagcttatcatcgactgcacggtgcaccaatgcttctggcgtcaggcagccatcggaagctgtggtatggctgtgcaggtcgtaaatcactgcataattcgtgtcgctcaaggcgcactcccgttctggataatgttttttgcgccgacatcataacggttctggcaaatattctgaaatgagctgttgacaattaatcatccggctcgtataatgtgtggaattgtgagcggataacaatttcacacaggaaacagcgccgctgagaaaaagcgaagcggcactgctctttaacaatttatcagacaatctgtgtgggcactcgaccggaattatcgattaactttattattaaaaattaaagaggtatatattaatgtatcgattaaataaggaggaataaaccatggtcgttttagtaactggagcaacggcaggttttggtgaatgcattactcgtcgttttattcaacaagggcataaagttatcgccactggccgtcgccaggaacggttgcaggagttaaaagacgaactgggagataatctgtatatcgcccaactggacgttcgcaaccgcgccgctattgaagagatgctggcatcgcttcctgccgagtggtgcaatattgatatcctggtaaataatgccggcctggcgttgggcatggagcctgcgcataaagccagcgttgaagactgggaaacgatgattgataccaacaacaaaggcctggtatatatgacgcgcgccgtcttaccgggtatggttgaacgtaatcatggtcatattattaacattggctcaacggcaggtagctggccgtatgccggtggtaacgtttacggtgcgacgaaagcgtttgttcgtcagtttagcctgaatctgcgtacggatctgcatggtacggcggtgcgcgtcaccgacatcgaaccgggtctggtgggtggtaccgagttttccaatgtccgctttaaaggcgatgacggtaaagcagaaaaaacctatcaaaataccgttgcattgacgccagaagatgtcagcgaagccgtctggtgggtgtcaacgctgcctgctcacgtcaatatcaataccctggaaatgatgccggttacccaaagctatgccggactgaatgtccaccgtcagtaaattaaagaggtggatccgagatctcggtagtgggatacgacgataccgaagacagctcatgttatatcccgccgtcaaccaccatcaaacaggattttcgcctgctggggcaaaccagcgtggaccgcttgctgcaactctctcagggccaggcggtgaagggcaatcagctgttgcccgtctcactggtgaaaagaaaaaccaccctggcgcccaatacgcaaaccgcctctccccgcgcgttggccgattcattaatgcagctggcacgacaggtttcccgactggaaagcgggcagtgagcgcaacgcaattaatgtgagttagcgcgaattgatctggtttgacagcttatcatcgactgcacggtgcaccaatgcttctggcgtcaggcagccatcggaagctgtggtatggctgtgcaggtcgtaaatcactgcataattcgtgtcgctcaaggcgcactcccgttctggataatgttttttgcgccgacatcataacggttctggcaaatattctgaaatgagctgttgacaattaatcatccggctcgtataatgtgtggaattgtgagcggataacaatttcacacaggaaacagcgccgctgagaaaaagcgaagcggcactgctctttaacaatttatcagacaatctgtgtgggcactcgaccggaattatcgattaactttattattaaaaattaaagaggtatatattaatgtatcgattaaataaggaggaataaaccatggcaggcgatcacgttctgccgccggtttgggcgaaccagattgtccgtttcgctaaccgctccctggaaggtctggagttcgcgtgcgcgtggaccgcacagctgctgcacagccaacgtcatattaacgaaattacgctgaacattccagccaatattagcgcgaccacgggcgcacgttccgccagcgtcggctgggccgagtccttgattggtctgcacctgggcaaggtggctctgattaccggtggttcggcgggcatcggtggtcaaatcggtcgtctgctggccttgtctggcgcgcgtgtgatgctggccgctcgcgatcgccataaattggaacagatgcaagccatgattcaaagcgaattggcggaggttggttataccgatgtggaggaccgtgtgcacatcgctccgggttgcgatgtgagcagcgaggcgcagctggcagatctggtggaacgtacgctgtccgcattcggtaccgtggattatttgattaataacgccggtattgcgggcgtggaggagatggtgatcgacatgccggtggaaggctggcgtcacaccctgtttgccaacctgatttcgaattattcgctgatgcgcaagttggcgccgctgatgaagaagcaaggtagcggttacatcctgaacgtttcttcctattttggcggtgagaaggacgcggcgattccttatccgaaccgcgccgactacgccgtctccaaggctggccaacgcgcgatggcggaagtgttcgctcgtttcctgggtccagagattcagatcaatgctattgccccaggtccggttgaaggcgaccgcctgcgtggtaccggtgagcgtccgggcctgtttgctcgtcgcgcccgtctgatcttggagaataaacgcctgaacgaattgcacgcggctttgattgctgcggcccgcaccgatgagcgctcgatgcacgagttggttgaattgttgctgccgaacgacgtggccgcgttggagcagaacccagcggcccctaccgcgctgcgtgagctggcacgccgcttccgtagcgaaggtgatccggcggcaagctcctcgtccgccttgctgaatcgctccatcgctgccaagctgttggctcgcttgcataacggtggctatgtgctgccggcggatatttttgcaaatctgcctaatccgccggacccgttctttacccgtgcgcaaattgaccgcgaagctcgcaaggtgcgtgatggtattatgggtatgctgtatctgcagcgtatgccaaccgagtttgacgtcgctatggcaaccgtgtactatctggccgatcgtaacgtgagcggcgaaactttccatccgtctggtggtttgcgctacgagcgtaccccgaccggtggcgagctgttcggcctgccatcgccggaacgtctggcggagctggttggtagcacggtgtacctgatcggtgaacacctgaccgagcacctgaacctgctggctcgtgcctatttggagcgctacggtgcccgtcaagtggtgatgattgttgagacggaaaccggtgcggaaaccatgcgtcgtctgttgcatgatcacgtcgaggcaggtcgcctgatgactattgtggcaggtgatcagattgaggcagcgattgaccaagcgatcacgcgctatggccgtccgggtccggtggtgtgcactccattccgtccactgccaaccgttccgctggtcggtcgtaaagactccgattggagcaccgttttgagcgaggcggaatttgcggaactgtgtgagcatcagctgacccaccatttccgtgttgctcgtaagatcgccttgtcggatggcgcgtcgctggcgttggttaccccggaaacgactgcgactagcaccacggagcaatttgctctggcgaacttcatcaagaccaccctgcacgcgttcaccgcgaccatcggtgttgagtcggagcgcaccgcgcaacgtattctgattaaccaggttgatctgacgcgccgcgcccgtgcggaagagccgcgtgacccgcacgagcgtcagcaggaattggaacgcttcattgaagccgttctgctggttaccgctccgctgcctcctgaggcagacacgcgctacgcaggccgtattcaccgcggtcgtgcgattaccgtctaatagaagcttggctgttttggcggatgagagaagattttcagcctgatacagattaaatcagaacgcagaagcggtctgataaaacagaatttgcctggcggcagtagcgcggtggtcccacctgaccccatgccgaactcagaagtgaaacgccgtagcgccgatggtagtgtggggtctccccatgcgagagtagggaactgccaggcatcaaataaaacgaaaggctcagtcgaaagactgggcctttcgttttatctgttgtttgtcggtgaacgctctcctgagtaggacaaatccgccgggagcggatttgaacgttgcgaagcaacggcccggagggtggcgggcaggacgcccgccataaactgccaggcatcaaattaagcagaaggccatcctgacggatggcctttttgcgtttctacaaactctttttgtttatttttctaaatacattcaaatatgtatccgctcatgagacaataaccctgataaatgcttcaataatattgaaaaaggaagagtatgagtattcaacatttccgtgtcgcccttattcccttttttgcggcattttgccttcctgtttttgctcacccagaaacgctggtgaaagtaaaagatgctgaagatcagttgggtgcacgagtgggttacatcgaactggatctcaacagcggtaagatccttgagagttttcgccccgaagaacgttttccaatgatgagcacttttaaagttctgctatgtggcgcggtattatcccgtgttgacgccgggcaagagcaactcggtcgccgcatacactattctcagaatgacttggttgagtactcaccagtcacagaaaagcatcttacggatggcatgacagtaagagaattatgcagtgctgccataaccatgagtgataacactgcggccaacttacttctgacaacgatcggaggaccgaaggagctaaccgcttttttgcacaacatgggggatcatgtaactcgccttgatcgttgggaaccggagctgaatgaagccataccaaacgacgagcgtgacaccacgatgcctgtagcaatggcaacaacgttgcgcaaactattaactggcgaactacttactctagcttcccggcaacaattaatagactggatggaggcggataaagttgcaggaccacttctgcgctcggcccttccggctggctggtttattgctgataaatctggagccggtgagcgtgggtctcgcggtatcattgcagcactggggccagatggtaagccctcccgtatcgtagttatctacacgacggggagtcaggcaactatggatgaacgaaatagacagatcgctgagataggtgcctcactgattaagcattggtaactgtcagaccaagtttactcatatatactttagattgatttaaaacttcatttttaatttaaaaggatctaggtgaagatcctttttgataatctcatgaccaaaatcccttaacgtgagttttcgttccactgagcgtcagaccccgtagaaaagatcaaaggatcttcttgagatcctttttttctgcgcgtaatctgctgcttgcaaacaaaaaaaccaccgctaccagcggtggtttgtttgccggatcaagagctaccaactctttttccgaaggtaactggcttcagcagagcgcagataccaaatactgtccttctagtgtagccgtagttaggccaccacttcaagaactctgtagcaccgcctacatacctcgctctgctaatcctgttaccagtggctgctgccagtggcgataagtcgtgtcttaccgggttggactcaagacgatagttaccggataaggcgcagcggtcgggctgaacggggggttcgtgcacacagcccagcttggagcgaacgacctacaccgaactgagatacctacagcgtgagctatgagaaagcgccacgcttcccgaagggagaaaggcggacaggtatccggtaagcggcagggtcggaacaggagagcgcacgagggagcttccagggggaaacgcctggtatctttatagtcctgtcgggtttcgccacctctgacttgagcgtcgatttttgtgatgctcgtcaggggggcggagcctatggaaaaacgccagcaacgcggcctttttacggttcctggccttttgctggccttttgctcacatgttctttcctgcgttatcccctgattctgtggataaccgtattaccgcctttgagtgagctgataccgctcgccgcagccgaacgaccgagcgcagcgagtcagtgagcgaggaagcggaagagcgcctgatgcggtattttctccttacgcatctgtgcggtatttcacaccgcatatggtgcactctcagtacaatctgctctgatgccgcatagttaagccagtatacactccgctatcgctacgtgactgggtcatggctgcgccccgacacccgccaacacccgctgacgcgccctgacgggcttgtctgctcccggcatccgcttacagacaagctgtgaccgtctccgggagctgcatgtgtcagaggttttcaccgtcatcaccgaaacgcgcgaggcagcagatcaattcgcgcgcgaaggcgaagcggcatgcatttacgttgacaccatcgaatggtgcaaaacctttcgcggtatggcatgatagcgcccggaagagagtcaattcagggtggtgaatgtgaaaccagtaacgttatacgatgtcgcagagtatgccggtgtctcttatcagaccgtttcccgcgtggtgaaccaggccagccacgtttctgcgaaaacgcgggaaaaagtggaagcggcgatggcggagctgaattacattcccaaccgcgtggcacaacaactggcgggcaaacagtcgttgctgattggcgttgccacctccagtctggccctgcacgcgccgtcgcaaattgtcgcggcgattaaatctcgcgccgatcaactgggtgccagcgtggtggtgtcgatggtagaacgaagcggcgtcgaagcctgtaaagcggcggtgcacaatcttctcgcgcaacgcgtcagtgggctgatcattaactatccgctggatgaccaggatgccattgctgtggaagctgcctgcactaatgttccggcgttatttcttgatgtctctgaccagacacccatcaacagtattattttctcccatgaagacggtacgcgactgggcgtggagcatctggtcgcattgggtcaccagcaaatcgcgctgttagcgggcccattaagttctgtctcggcgcgtctgcgtctggctggctggcataaatatctcactcgcaatcaaattcagccgatagcggaacgggaaggcgactggagtgccatgtccggttttcaacaaaccatgcaaatgctgaatgagggcatcgttcccactgcgatgctggttgccaacgatcagatggcgctgggcgcaatgcgcgccattaccgagtccgggctgcgcgttggtgcggatatctcggtagtgggatacgacgataccgaagacagctcatgttatatcccgccgtcaaccaccatcaaacaggattttcgcctgctggggcaaaccagcgtggaccgcttgctgcaactctctcagggccaggcggtgaagggcaatcagctgttgcccgtctcactggtgaaaagaaaaaccaccctggcgcccaatacgcaaaccgcctctccccgcgcgttggccgattcattaatgcagctggcacgacaggtttcccgactggaaagcgggcagtgagcgcaacgcaattaatgtgagttagcgcgaattgatctg

SEQ ID NO: 131 - DNA, 7934 bp, Artificial Sequence
  Description of Artificial Sequence: Synthetic polynucleotide
catggccggtacgggtcgtttggctggtaaaattgcattgatcaccggtggtgctggtaacattggttccgagctgacccgccgttttctggccgagggtgcgacggttattatcagcggccgtaaccgtgcgaagctgaccgcgctggccgagcgcatgcaagccgaggccggcgtgccggccaagcgcattgatttggaggtgatggatggttccgaccctgtggctgtccgtgccggtatcgaggcaatcgtcgctcgccacggtcagattgacattctggttaacaacgcgggctccgccggtgcccaacgtcgcttggcggaaattccgctgacggaggcagaattgggtccgggtgcggaggagactttgcacgcttcgatcgcgaatctgttgggcatgggttggcacctgatgcgtattgcggctccgcacatgccagttggctccgcagttatcaacgtttcgactattttctcgcgcgcagagtactatggtcgcattccgtacgttaccccgaaggcagcgctgaacgctttgtcccagctggctgcccgcgagctgggcgctcgtggcatccgcgttaacactattttcccaggtcctattgagtccgaccgcatccgtaccgtgtttcaacgtatggatcaactgaagggtcgcccggagggcgacaccgcccatcactttttgaacaccatgcgcctgtgccgcgcaaacgaccaaggcgctttggaacgccgctttccgtccgttggcgatgttgctgatgcggctgtgtttctggcttctgctgagagcgcggcactgtcgggtgagacgattgaggtcacccacggtatggaactgccggcgtgtagcgaaacctccttgttggcgcgtaccgatctgcgtaccatcgacgcgagcggtcgcactaccctgatttgcgctggcgatcaaattgaagaagttatggccctgacgggcatgctgcgtacgtgcggtagcgaagtgattatcggcttccgttctgcggctgccctggcgcaatttgagcaggcagtgaatgaatctcgccgtctggcaggtgcggatttcaccccgccgatcgctttgccgttggacccacgtgacccggccaccattgatgcggttttcgattggggcgcaggcgagaatacgggtggcatccatgcggcggtcattctgccggcaacctcccacgaaccggctccgtgcgtgattgaagtcgatgacgaacgcgtcctgaatttcctggccgatgaaattaccggcaccatcgttattgcgagccgtttggcgcgctattggcaatcccaacgcctgaccccgggtgcccgtgcccgcggtccgcgtgttatctttctgagcaacggtgccgatcaaaatggtaatgtttacggtcgtattcaatctgcggcgatcggtcaattgattcgcgtttggcgtcacgaggcggagttggactatcaacgtgcatccgccgcaggcgatcacgttctgccgccggtttgggcgaaccagattgtccgtttcgctaaccgctccctggaaggtctggagttcgcgtgcgcgtggaccgcacagctgctgcacagccaacgtcatattaacgaaattacgctgaacattccagccaatattagcgcgaccacgggcgcacgttccgccagcgtcggctgggccgagtccttgattggtctgcacctgggcaaggtggctctgattaccggtggttcggcgggcatcggtggtcaaatcggtcgtctgctggccttgtctggcgcgcgtgtgatgctggccgctcgcgatcgccataaattggaacagatgcaagccatgattcaaagcgaattggcggaggttggttataccgatgtggaggaccgtgtgcacatcgctccgggttgcgatgtgagcagcgaggcgcagctggcagatctggtggaacgtacgctgtccgcattcggtaccgtggattatttgattaataacgccggtattgcgggcgtggaggagatggtgatcgacatgccggtggaaggctggcgtcacaccctgtttgccaacctgatttcgaattattcgctgatgcgcaagttggcgccgctgatgaagaagcaaggtagcggttacatcctgaacgtttcttcctattttggcggtgagaaggacgcggcgattccttatccgaaccgcgccgactacgccgtctccaaggctggccaacgcgcgatggcggaagtgttcgctcgtttcctgggtccagagattcagatcaatgctattgccccaggtccggttgaaggcgaccgcctgcgtggtaccggtgagcgtccgggcctgtttgctcgtcgcgcccgtctgatcttggagaataaacgcctgaacgaattgcacgcggctttgattgctgcggcccgcaccgatgagcgctcgatgcacgagttggttgaattgttgctgccgaacgacgtggccgcgttggagcagaacccagcggcccctaccgcgctgcgtgagctggcacgccgcttccgtagcgaaggtgatccggcggcaagctcctcgtccgccttgctgaatcgctccatcgctgccaagctgttggctcgcttgcataacggtggctatgtgctgccggcggatatttttgcaaatctgcctaatccgccggacccgttctttacccgtgcgcaaattgaccgcgaagctcgcaaggtgcgtgatggtattatgggtatgctgtatctgcagcgtatgccaaccgagtttgacgtcgctatggcaaccgtgtactatctggccgatcgtaacgtgagcggcgaaactttccatccgtctggtggtttgcgctacgagcgtaccccgaccggtggcgagctgttcggcctgccatcgccggaacgtctggcggagctggttggtagcacggtgtacctgatcggtgaacacctgaccgagcacctgaacctgctggctcgtgcctatttggagcgctacggtgcccgtcaagtggtgatgattgttgagacggaaaccggtgcggaaaccatgcgtcgtctgttgcatgatcacgtcgaggcaggtcgcctgatgactattgtggcaggtgatcagattgaggcagcgattgaccaagcgatcacgcgctatggccgtccgggtccggtggtgtgcactccattccgtccactgccaaccgttccgctggtcggtcgtaaagactccgattggagcaccgttttgagcgaggcggaatttgcggaactgtgtgagcatcagctgacccaccatttccgtgttgctcgtaagatcgccttgtcggatggcgcgtcgctggcgttggttaccccggaaacgactgcgactagcaccacggagcaatttgctctggcgaacttcatcaagaccaccctgcacgcgttcaccgcgaccatcggtgttgagtcggagcgcaccgcgcaacgtattctgattaaccaggttgatctgacgcgccgcgcccgtgcggaagagccgcgtgacccgcacgagcgtcagcaggaattggaacgcttcattgaagccgttctgctggttaccgctccgctgcctcctgaggcagacacgcgctacgcaggccgtattcaccgcggtcgtgcgattaccgtctaatagaagcttggctgttttggcggatgagagaagattttcagcctgatacagattaaatcagaacgcagaagcggtctgataaaacagaatttgcctggcggcagtagcgcggtggtcccacctgaccccatgccgaactcagaagtgaaacgccgtagcgccgatggtagtgtggggtctccccatgcgagagtagggaactgccaggcatcaaataaaacgaaaggctcagtcgaaagactgggcctttcgttttatctgttgtttgtcggtgaacgctctcctgagtaggacaaatccgccgggagcggatttgaacgttgcgaagcaacggcccggagggtggcgggcaggacgcccgccataaactgccaggcatcaaattaagcagaaggccatcctgacggatggcctttttgcgtttctacaaactctttttgtttatttttctaaatacattcaaatatgtatccgctcatgagacaataaccctgataaatgcttcaataatattgaaaaaggaagagtatgagtattcaacatttccgtgtcgcccttattcccttttttgcggcattttgccttcctgtttttgctcacccagaaacgctggtgaaagtaaaagatgctgaagatcagttgggtgcacgagtgggttacatcgaactggatctcaacagcggtaagatccttgagagttttcgccccgaagaacgttttccaatgatgagcacttttaaagttctgctatgtggcgcggtattatcccgtgttgacgccgggcaagagcaactcggtcgccgcatacactattctcagaatgacttggttgagtactcaccagtcacagaaaagcatcttacggatggcatgacagtaagagaattatgcagtgctgccataaccatgagtgataacactgcggccaacttacttctgacaacgatcggaggaccgaaggagctaaccgcttttttgcacaacatgggggatcatgtaactcgccttgatcgttgggaaccggagctgaatgaagccataccaaacgacgagcgtgacaccacgatgcctgtagcaatggcaacaacgttgcgcaaactattaactggcgaactacttactctagcttcccggcaacaattaatagactggatggaggcggataaagttgcaggaccacttctgcgctcggcccttccggctggctggtttattgctgataaatctggagccggtgagcgtgggtctcgcggtatcattgcagcactggggccagatggtaagccctcccgtatcgtagttatctacacgacggggagtcaggcaactatggatgaacgaaatagacagatcgctgagataggtgcctcactgattaagcattggtaactgtcagaccaagtttactcatatatactttagattgatttaaaacttcatttttaatttaaaaggatctaggtgaagatcctttttgataatctcatgaccaaaatcccttaacgtgagttttcgttccactgagcgtcagaccccgtagaaaagatcaaaggatcttcttgagatcctttttttctgcgcgtaatctgctgcttgcaaacaaaaaaaccaccgctaccagcggtggtttgtttgccggatcaagagctaccaactctttttccgaaggtaactggcttcagcagagcgcagataccaaatactgtccttctagtgtagccgtagttaggccaccacttcaagaactctgtagcaccgcctacatacctcgctctgctaatcctgttaccagtggctgctgccagtggcgataagtcgtgtcttaccgggttggactcaagacgatagttaccggataaggcgcagcggtcgggctgaacggggggttcgtgcacacagcccagcttggagcgaacgacctacaccgaactgagatacctacagcgtgagctatgagaaagcgccacgcttcccgaagggagaaaggcggacaggtatccggtaagcggcagggtcggaacaggagagcgcacgagggagcttccagggggaaacgcctggtatctttatagtcctgtcgggtttcgccacctctgacttgagcgtcgatttttgtgatgctcgtcaggggggcggagcctatggaaaaacgccagcaacgcggcctttttacggttcctggccttttgctggccttttgctcacatgttctttcctgcgttatcccctgattctgtggataaccgtattaccgcctttgagtgagctgataccgctcgccgcagccgaacgaccgagcgcagcgagtcagtgagcgaggaagcggaagagcgcctgatgcggtattttctccttacgcatctgtgcggtatttcacaccgcatatggtgcactctcagtacaatctgctctgatgccgcatagttaagccagtatacactccgctatcgctacgtgactgggtcatggctgcgccccgacacccgccaacacccgctgacgcgccctgacgggcttgtctgctcccggcatccgcttacagacaagctgtgaccgtctccgggagctgcatgtgtcagaggttttcaccgtcatcaccgaaacgcgcgaggcagcagatcaattcgcgcgcgaaggcgaagcggcatgcatttacgttgacaccatcgaatggtgcaaaacctttcgcggtatggcatgatagcgcccggaagagagtcaattcagggtggtgaatgtgaaaccagtaacgttatacgatgtcgcagagtatgccggtgtctcttatcagaccgtttcccgcgtggtgaaccaggccagccacgtttctgcgaaaacgcgggaaaaagtggaagcggcgatggcggagctgaattacattcccaaccgcgtggcacaacaactggcgggcaaacagtcgttgctgattggcgttgccacctccagtctggccctgcacgcgccgtcgcaaattgtcgcggcgattaaatctcgcgccgatcaactgggtgccagcgtggtggtgtcgatggtagaacgaagcggcgtcgaagcctgtaaagcggcggtgcacaatcttctcgcgcaacgcgtcagtgggctgatcattaactatccgctggatgaccaggatgccattgctgtggaagctgcctgcactaatgttccggcgttatttcttgatgtctctgaccagacacccatcaacagtattattttctcccatgaagacggtacgcgactgggcgtggagcatctggtcgcattgggtcaccagcaaatcgcgctgttagcgggcccattaagttctgtctcggcgcgtctgcgtctggctggctggcataaatatctcactcgcaatcaaattcagccgatagcggaacgggaaggcgactggagtgccatgtccggttttcaacaaaccatgcaaatgctgaatgagggcatcgttcccactgcgatgctggttgccaacgatcagatggcgctgggcgcaatgcgcgccattaccgagtccgggctgcgcgttggtgcggatatctcggtagtgggatacgacgataccgaagacagctcatgttatatcccgccgtcaaccaccatcaaacaggattttcgcctgctggggcaaaccagcgtggaccgcttgctgcaactctctcagggccaggcggtgaagggcaatcagctgttgcccgtctcactggtgaaaagaaaaaccaccctggcgcccaatacgcaaaccgcctctccccgcgcgttggccgattcattaatgcagctggcacgacaggtttcccgactggaaagcgggcagtgagcgcaacgcaattaatgtgagttagcgcgaattgatctggtttgacagcttatcatcgactgcacggtgcaccaatgcttctggcgtcaggcagccatcggaagctgtggtatggctgtgcaggtcgtaaatcactgcataattcgtgtcgctcaaggcgcactcccgttctggataatgttttttgcgccgacatcataacggttctggcaaatattctgaaatgagctgttgacaattaatcatccggctcgtataatgtgtggaattgtgagcggataacaatttcacacaggaaacagcgccgctgagaaaaagcgaagcggcactgctctttaacaatttatcagacaatctgtgtgggcactcgaccggaattatcgattaactttattattaaaaattaaagaggtatatattaatgtatcgattaaataaggaggaataaac

SEQ ID NO: 132 - DNA, 11744 bp, Artificial Sequence
  Description of Artificial Sequence: Synthetic polynucleotide
ccttcaactcagcaaaagttcgatttattcaacaaagccacgttgtgtctcaaaatctctgatgttacattgcacaagataaaaatatatcatcatgaacaataaaactgtctgcttacataaacagtaatacaaggggtgttatgagccatattcaacgggaaacgtcttgctcgaggccgcgattaaattccaacatggatgctgatttatatgggtataaatgggctcgcgataatgtcgggcaatcaggtgcgacaatctatcgattgtatgggaagcccgatgcgccagagttgtttctgaaacatggcaaaggtagcgttgccaatgatgttacagatgagatggtcagactaaactggctgacggaatttatgcctcttccgaccatcaagcattttatccgtactcctgatgatgcatggttactcaccactgcgatccccgggaaaacagcattccaggtattagaagaatatcctgattcaggtgaaaatattgttgatgcgctggcagtgttcctgcgccggttgcattcgattcctgtttgtaattgtccttttaacagcgatcgcgtatttcgtctcgctcaggcgcaatcacgaatgaataacggtttggttgatgcgagtgattttgatgacgagcgtaatggctggcctgttgaacaagtctggaaagaaatgcataagcttttgccattctcaccggattcagtcgtcactcatggtgatttctcacttgataaccttatttttgacgaggggaaattaataggttgtattgatgttggacgagtcggaatcgcagaccgataccaggatcttgccatcctatggaactgcctcggtgagttttctccttcattacagaaacggctttttcaaaaatatggtattgataatcctgatatgaataaattgcagtttcatttgatgctcgatgagtttttctaatcgagtcaggcaactatggatgaacgaaatagacagatcgctgagataggtgcctcactgattaagcattggtaactgtcagaccaagtttactcatatatactttagattgatttaaaacttcatttttaatttaaaaggatctaggtgaagatcctttttgataatctcatgaccaaaatcccttaacgtgagttttcgttccactgagcgtcagaccccgtagaaaagatcaaaggatcttcttgagatcctttttttctgcgcgtaatctgctgcttgcaaacaaaaaaaccaccgctaccagcggtggtttgtttgccggatcaagagctaccaactctttttccgaaggtaactggcttcagcagagcgcagataccaaatactgtccttctagtgtagccgtagttaggccaccacttcaagaactctgtagcaccgcctacatacctcgctctgctaatcctgttaccagtggctgctgccagtggcgataagtcgtgtcttaccgggttggactcaagacgatagttaccggataaggcgcagcggtcgggctgaacggggggttcgtgcacacagcccagcttggagcgaacgacctacaccgaactgagatacctacagcgtgagctatgagaaagcgccacgcttcccgaagggagaaaggcggacaggtatccggtaagcggcagggtcggaacaggagagcgcacgagggagcttccagggggaaacgcctggtatctttatagtcctgtcgggtttcgccacctctgacttgagcgtcgatttttgtgatgctcgtcaggggggcggagcctatggaaaaacgccagcaacgcggcctttttacggttcctggccttttgctggccttttgctcacatgttctttcctgcgttatcccctgattctgtggataaccgtattaccgcctttgagtgagctgataccgctcgccgcagccgaacgaccgagcgcagcgagtcagtgagcgaggaagcggaagagcgcctgatgcggtattttctccttacgcatctgtgcggtatttcacaccgcatatcgtggcggctggcgttccttgtcgggttattcgcgaaataaacgaccgggataagcactattatttcaaagattataaagttgaatcgtcagtttaaattataaaaattgcctgatacgctgcgcttatcaggcctacaagttcagcgatctacattagccgcatccggcatgaacaaagcgcaggaacaagcgtcgcatcatgcctctttgacccacagctgcggaaaacgtactggtgcaaaacgcagggttatgatcatcagcccaacgacgcacagcgcatgaaatgcccagtccatcaggtaattgccgctgatactacgcagcacgccagaaaaccacggggcaagcccggcgatgataaaaccgattccctgcataaacgccaccagcttgccagcaatagccggttgcacagagtgatcgagcgccagcagcaaacagagcggaaacgcgccgcccagacctaacccacacaccatcgcccacaataccggcaattgcatcggcagccagataaagccgcagaaccccaccagttgtaacaccagcgccagcattaacagtttgcgccgatcctgatggcgagccatagcaggcatcagcaaagctcctgcggcttgcccaagcgtcatcaatgccagtaaggaaccgctgtactgcgcgctggcaccaatctcaatatagaaagcgggtaaccaggcaatcaggctggcgtaaccgccgttaatcagaccgaagtaaacacccagcgtccacgcgcggggagtgaataccacgcgaaccggagtggttgttgtcttgtgggaagaggcgacctcgcgggcgctttgccaccaccaggcaaagagcgcaacaacggcaggcagcgcccaccaggcgagtgtttgataccaggtttcgctatgttgaactaaccagggcgttatggcggcaccaagcccaccgccgcccatcagagccgcggaccacagccccatcaccagtggcgtgcgctgctgaaaccgccgtttaatcaccgaaggcatcaccgcctgaatgatgccgatccccaccccaccaagcagtgcgctgctaagcagcagcgcactttgcgggtaaagctcacgcatcaatgcaccgacggcaatcagcaacagactgatggcgacactgcgacgttcgctgacatgctgatgaagccagcttccggccagcgccagcccgcccatggtaaccaccggcagagcggtcaacagggcagccacgctaaagctcattccgctcgcctggcgcaattgcggtagcagtggcccgacggaggtgagcagtggtcgcatattaagaccaatcagcaccagtaccagcagcatcgtgaacgtcttttgatggttgcgcatggctgtcagaacggtttggtcggcagatatttaccatctaaggtgatgaccgcacgttcgccaccttccgggtccgccactttcttaacgtcgagtttgaagttaatcgcgctaataatgccatcgccaaatttctcatgaaccaacgctttcagggttgtaccgtacacctgcaacatttcatagaaacgatacatcgttgggtcagttggaatacggtcatcaatgcagccacgcagtggaatcatctgcaacagtagaatggagtcttcgtcgagatccagcttcgccccgaccaggcgggcggcgtcggcaggaagcgcctgctgacccagcaaagccgcggttacaaaggcttctgccagaccggtgccgtcggcaatctcggcaaatgagagatcttttttagctttgctgagcaaaatggcatcggcaagatcaagacgaatattgcggttaatttgtgactgaatcatggtggaactcctgatggtttaaaaataaggttacgctgcggtcggttggcgtagcggtatggcacaaacgcgaggattagcggccagtggcacaaactggcgggttgcgccgtcaaaagctgcgatgctgccgctttcaatgtcgtagacccagccgtgcagggcgatccgcccctcttcgagcgccaggcgcaccgatggatgagtttgcaaattagccaactgagcaatgacgttttcacgtaccatcgccgcagcttttgacggtaaatcggaatgcgggcgcgcctcattaacgacgcgggctgaatcggcataacgcagccagtgggagacggcaggcatatggtccatgcactgacagctggcaatggcggtcatcgcgccacagttggaatgaccacaaatcacaatgtcagatacccgaagcgcagcgacggcatactccaccgaagcagaaacgccaccgggttccggcccgtaggaagggacgatattgcccgcgttgcgaataacgaacagatcgccaggctcacgttgcgtcaccagctcagggaccagacggctgtcggagcaggagataaaaagtgtgcgcgggctttgctgtgtcgccagctgtttaaacaaggcttcccgcttcggaaatgcctcgcgctggaatttaaggaatccatcaataatctctttcaccgttaacctctgtctgtctctggaatgagaggcagactactcgccgattgtcataaggtaaaagtctcatttatgatgagttccattggatttacttataggttgcgaatgctctctcgacatatcaattattttcttgccgtggctgaacatggcagcttcacccgtgccgccagtgcgttgcacgtctcccaacctgcgctttcccagcagattcgccagttagaggagagtttaggcgtgccgctgtttgaccgtagcgggcgaacgattcgtctcactgatgcaggagaagtctggtatggtgcactctcagtacaatctgctctgatgccgcatagttaagccagtatacactccgctatcgctacgtgactgggtcatggctgcgccccgacacccgccaacacccgctgacgcgccctgacgggcttgtctgctcccggcatccgcttacagacaagctgtgaccgtctccgggagctgcatgtgtcagaggttttcaccgtcatcaccgaaacgcgcgaggcagcagatcaattcgcgcgcgaaggcgaagcggcatgcatttacgttgacaccatcgaatggtgcaaaacctttcgcggtatggcatgatagcgcccggaagagagtcaattcagggtggtgaatgtgaaaccagtaacgttatacgatgtcgcagagtatgccggtgtctcttatcagaccgtttcccgcgtggtgaaccaggccagccacgtttctgcgaaaacgcgggaaaaagtggaagcggcgatggcggagctgaattacattcccaaccgcgtggcacaacaactggcgggcaaacagtcgttgctgattggcgttgccacctccagtctggccctgcacgcgccgtcgcaaattgtcgcggcgattaaatctcgcgccgatcaactgggtgccagcgtggtggtgtcgatggtagaacgaagcggcgtcgaagcctgtaaagcggcggtgcacaatcttctcgcgcaacgcgtcagtgggctgatcattaactatccgctggatgaccaggatgccattgctgtggaagctgcctgcactaatgttccggcgttatttcttgatgtctctgaccagacacccatcaacagtattattttctcccatgaagacggtacgcgactgggcgtggagcatctggtcgcattgggtcaccagcaaatcgcgctgttagcgggcccattaagttctgtctcggcgcgtctgcgtctggctggctggcataaatatctcactcgcaatcaaattcagccgatagcggaacgggaaggcgactggagtgccatgtccggttttcaacaaaccatgcaaatgctgaatgagggcatcgttcccactgcgatgctggttgccaacgatcagatggcgctgggcgcaatgcgcgccattaccgagtccgggctgcgcgttggtgcggatatctcggtagtgggatacgacgataccgaagacagctcatgttatatcccgccgtcaaccaccatcaaacaggattttcgcctgctggggcaaaccagcgtggaccgcttgctgcaactctctcagggccaggcggtgaagggcaatcagctgttgcccgtctcactggtgaaaagaaaaaccaccctggcgcccaatacgcaaaccgcctctccccgcgcgttggccgattcattaatgcagctggcacgacaggtttcccgactggaaagcgggcagtgagcgcaacgcaattaatgtgagttagcgcgaattgatctggtttgacagcttatcatcgactgcacggtgcaccaatgcttctggcgtcaggcagccatcggaagctgtggtatggctgtgcaggtcgtaaatcactgcataattcgtgtcgctcaaggcgcactcccgttctggataatgttttttgcgccgacatcataacggttctggcaaatattctgaaatgagctgttgacaattaatcatccggctcgtataatgtgtggaattgtgagcggataacaatttcacacaggaaacagcgccgctgagaaaaagcgaagcggcactgctctttaacaatttatcagacaatctgtgtgggcactcgaccggaattatcgattaactttattattaaaaattaaagaggtatatattaatgtatcgattaaataaggaggaataaaccatggccggtacgggtcgtttggctggtaaaattgcattgatcaccggtggtgctggtaacattggttccgagctgacccgccgttttctggccgagggtgcgacggttattatcagcggccgtaaccgtgcgaagctgaccgcgctggccgagcgcatgcaagccgaggccggcgtgccggccaagcgcattgatttggaggtgatggatggttccgaccctgtggctgtccgtgccggtatcgaggcaatcgtcgctcgccacggtcagattgacattctggttaacaacgcgggctccgccggtgcccaacgtcgcttggcggaaattccgctgacggaggcagaattgggtccgggtgcggaggagactttgcacgcttcgatcgcgaatctgttgggcatgggttggcacctgatgcgtattgcggctccgcacatgccagttggctccgcagttatcaacgtttcgactattttctcgcgcgcagagtactatggtcgcattccgtacgttaccccgaaggcagcgctgaacgctttgtcccagctggctgcccgcgagctgggcgctcgtggcatccgcgttaacactattttcccaggtcctattgagtccgaccgcatccgtaccgtgtttcaacgtatggatcaactgaagggtcgcccggagggcgacaccgcccatcactttttgaacaccatgcgcctgtgccgcgcaaacgaccaaggcgctttggaacgccgctttccgtccgttggcgatgttgctgatgcggctgtgtttctggcttctgctgagagcgcggcactgtcgggtgagacgattgaggtcacccacggtatggaactgccggcgtgtagcgaaacctccttgttggcgcgtaccgatctgcgtaccatcgacgcgagcggtcgcactaccctgatttgcgctggcgatcaaattgaagaagttatggccctgacgggcatgctgcgtacgtgcggtagcgaagtgattatcggcttccgttctgcggctgccctggcgcaatttgagcaggcagtgaatgaatctcgccgtctggcaggtgcggatttcaccccgccgatcgctttgccgttggacccacgtgacccggccaccattgatgcggttttcgattggggcgcaggcgagaatacgggtggcatccatgcggcggtcattctgccggcaacctcccacgaaccggctccgtgcgtgattgaagtcgatgacgaacgcgtcctgaatttcctggccgatgaaattaccggcaccatcgttattgcgagccgtttggcgcgctattggcaatcccaacgcctgaccccgggtgcccgtgcccgcggtccgcgtgttatctttctgagcaacggtgccgatcaaaatggtaatgtttacggtcgtattcaatctgcggcgatcggtcaattgattcgcgtttggcgtcacgaggcggagttggactatcaacgtgcatccgccgcaggcgatcacgttctgccgccggtttgggcgaaccagattgtccgtttcgctaaccgctccctggaaggtctggagttcgcgtgcgcgtggaccgcacagctgctgcacagccaacgtcatattaacgaaattacgctgaacattccagccaatattagcgcgaccacgggcgcacgttccgccagcgtcggctgggccgagtccttgattggtctgcacctgggcaaggtggctctgattaccggtggttcggcgggcatcggtggtcaaatcggtcgtctgctggccttgtctggcgcgcgtgtgatgctggccgctcgcgatcgccataaattggaacagatgcaagccatgattcaaagcgaattggcggaggttggttataccgatgtggaggaccgtgtgcacatcgctccgggttgcgatgtgagcagcgaggcgcagctggcagatctggtggaacgtacgctgtccgcattcggtaccgtggattatttgattaataacgccggtattgcgggcgtggaggagatggtgatcgacatgccggtggaaggctggcgtcacaccctgtttgccaacctgatttcgaattattcgctgatgcgcaagttggcgccgctgatgaagaagcaaggtagcggttacatcctgaacgtttcttcctattttggcggtgagaaggacgcggcgattccttatccgaaccgcgccgactacgccgtctccaaggctggccaacgcgcgatggcggaagtgttcgctcgtttcctgggtccagagattcagatcaatgctattgccccaggtccggttgaaggcgaccgcctgcgtggtaccggtgagcgtccgggcctgtttgctcgtcgcgcccgtctgatcttggagaataaacgcctgaacgaattgcacgcggctttgattgctgcggcccgcaccgatgagcgctcgatgcacgagttggttgaattgttgctgccgaacgacgtggccgcgttggagcagaacccagcggcccctaccgcgctgcgtgagctggcacgccgcttccgtagcgaaggtgatccggcggcaagctcctcgtccgccttgctgaatcgctccatcgctgccaagctgttggctcgcttgcataacggtggctatgtgctgccggcggatatttttgcaaatctgcctaatccgccggacccgttctttacccgtgcgcaaattgaccgcgaagctcgcaaggtgcgtgatggtattatgggtatgctgtatctgcagcgtatgccaaccgagtttgacgtcgctatggcaaccgtgtactatctggccgatcgtaacgtgagcggcgaaactttccatccgtctggtggtttgcgctacgagcgtaccccgaccggtggcgagctgttcggcctgccatcgccggaacgtctggcggagctggttggtagcacggtgtacctgatcggtgaacacctgaccgagcacctgaacctgctggctcgtgcctatttggagcgctacggtgcccgtcaagtggtgatgattgttgagacggaaaccggtgcggaaaccatgcgtcgtctgttgcatgatcacgtcgaggcaggtcgcctgatgactattgtggcaggtgatcagattgaggcagcgattgaccaagcgatcacgcgctatggccgtccgggtccggtggtgtgcactccattccgtccactgccaaccgttccgctggtcggtcgtaaagactccgattggagcaccgttttgagcgaggcggaatttgcggaactgtgtgagcatcagctgacccaccatttccgtgttgctcgtaagatcgccttgtcggatggcgcgtcgctggcgttggttaccccggaaacgactgcgactagcaccacggagcaatttgctctggcgaacttcatcaagaccaccctgcacgcgttcaccgcgaccatcggtgttgagtcggagcgcaccgcgcaacgtattctgattaaccaggttgatctgacgcgccgcgcccgtgcggaagagccgcgtgacccgcacgagcgtcagcaggaattggaacgcttcattgaagccgttctgctggttaccgctccgctgcctcctgaggcagacacgcgctacgcaggccgtattcaccgcggtcgtgcgattaccgtctaatagaagcttggctgttttggcggatgagagaagattttcagcctgatacagattaaatcagaacgcagaagcggtctgataaaacagaatttgcctggcggcagtagcgcggtggtcccacctgaccccatgccgaactcagaagtgaaacgccgtagcgccgatggtagtgtggggtctccccatgcgagagtagggaactgccaggcatcaaataaaacgaaaggctcagtcgaaagactgggcctttcgttttatctgttgtttgtcggtgaacgctctcctgagtaggacaaatccgccgggagcggatttgaacgttgcgaagcaacggcccggagggtggcgggcaggacgcccgccataaactgccaggcatcaaattaagcagaaggccatcctgacggatggcctttttgcgtttctacaaactctttttgtttatttttctaaatacattcaaatatgtatccgctcatgagacaataaccctgataaatgcttcaataatattgaaaaaggaagagtatgagtattcaacatttccgtgtcgcccttattcccttttttgcggcattttgccttcctgtttttgctcacccagaaacgctggtgaaagtaaaagatgctgaagatcagttgggtgcacgagtgggttacatcgaactggatctcaacagcggtaagatccttgagagttttcgccccgaagaacgttttccaatgatgagcacttttaaagttctgctatgtggcgcggtattatcccgtgttgacgccgggcaagagcaactcggtcgccgcatacactattctcagaatgacttggttgagtactcaccagtcacagaaaagcatcttacggatggcatgacagtaagagaattatgcagtgctgccataaccatgagtgataacactgcggccaacttacttctgacaacgatcggaggaccgaaggagctaaccgcttttttgcacaacatgggggatcatgtaactcgccttgatcgttgggaaccggagctgaatgaagccataccaaacgacgagcgtgacaccacgatgcctgtagcaatggcaacaacgttgcgcaaactattaactggcgaactacttactctagcttcccggcaacaattaatagactggatggaggcggataaagttgcaggaccacttctgcgctcggcccttccggctggctggtttattgctgataaatctggagccggtgagcgtgggtctcgcggtatcattgcagcactggggccagatggtaagccctcccgtatcgtagttatctacacgacgg

SEQ ID NO: 133 - DNA, 6915 bp, Artificial Sequence
  Description of Artificial Sequence: Synthetic polynucleotide
gaattccggatgagcattcatcaggcgggcaagaatgtgaataaaggccggataaaacttgtgcttatttttctttacggtctttaaaaaggccgtaatatccagctgaacggtctggttataggtacattgagcaactgactgaaatgcctcaaaatgttctttacgatgccattgggatatatcaacggtggtatatccagtgatttttttctccattttagcttccttagctcctgaaaatctcgataactcaaaaaatacgcccggtagtgatcttatttcattatggtgaaagttggaacctcttacgtgccgatcaacgtctcattttcgccaaaagttggcccagggcttcccggtatcaacagggacaccaggatttatttattctgcgaagtgatcttccgtcacaggtatttattcggcgcaaagtgcgtcgggtgatgctgccaacttactgatttagtgtatgatggtgtttttgaggtgctccagtggcttctgtttctatcagctgtccctcctgttcagctactgacggggtggtgcgtaacggcaaaagcaccgccggacatcagcgctagcggagtgtatactggcttactatgttggcactgatgagggtgtcagtgaagtgcttcatgtggcaggagaaaaaaggctgcaccggtgcgtcagcagaatatgtgatacaggatatattccgcttcctcgctcactgactcgctacgctcggtcgttcgactgcggcgagcggaaatggcttacgaacggggcggagatttcctggaagatgccaggaagatacttaacagggaagtgagagggccgcggcaaagccgtttttccataggctccgcccccctgacaagcatcacgaaatctgacgctcaaatcagtggtggcgaaacccgacaggactataaagataccaggcgtttccccctggcggctccctcgtgcgctctcctgttcctgcctttcggtttaccggtgtcattccgctgttatggccgcgtttgtctcattccacgcctgacactcagttccgggtaggcagttcgctccaagctggactgtatgcacgaaccccccgttcagtccgaccgctgcgccttatccggtaactatcgtcttgagtccaacccggaaagacatgcaaaagcaccactggcagcagccactggtaattgatttagaggagttagtcttgaagtcatgcgccggttaaggctaaactgaaaggacaagttttggtgactgcgctcctccaagccagttacctcggttcaaagagttggtagctcagagaaccttcgaaaaaccgccctgcaaggcggttttttcgttttcagagcaagagattacgcgcagaccaaaacgatctcaagaagatcatcttattaatcagataaaatatttctagatttcagtgcaatttatctcttcaaatgtagcacctgaagtcagccccatacgatataagttgtaattctcatgtttgacagcttatcatcgataagctttaatgcggtagtttatcacagttaaattgctaacgcagtcaggcaccgtgtatgaaatctaacaatgcgctcatcgtcatcctcggcaccgtcaccctggatgctgtaggcataggcttggttatgccggtactgccgggcctcttgcgggatttaagctcgggccccctgggcggttctgataacgagtaatcgttaatccgcaaataacgtaaaaacccgcttcggcgggtttttttatggggggagtttagggaaagagcatttgtcagaatatttaagggcgcctgtcactttgcttgatatatgagaattatttaaccttataaatgagaaaaaagcaacgcactttaaataagatacgttgctttttcgattgatgaacacctataattaaactattcatctattatttatgattttttgtatatacaatatttctagtttgttaaagagaattaagaaaataaatctcgaaaataataaagggaaaatcagtttttgatgggttacagagctttcaggattgcatccacgctggctttggcgtcaccaaacagcatgtgggtgttttccttgaagaacagcgggttttgcacaccagcatagccagtgttcatcgaacgtttaaagacaatcacgttctgcgctttccacacttccagcacaggcataccagcaatcggactcttcggatcatcctgcgccgccgggttaaccgtatcgttagcaccaatcaccagtacggtatcggtatcagcaaagtcatcattgatctcgtccatttccagcacgatgtcatacggtacttttgcttcagccagcaatacgttcatatgtccaggcaaacgccccgcgaccgggtggataccgaaacgcacattaataccacgagcgcgcaatttctcagtaatttcagcgacaggatattgcgcctgcgcgactgccatgccgtaccccggagtaatgatcactgaatgggagtttttcagcagttccgctgtctcttctgcggtgatttcgcggtgctcacccacttcctgatcatcgccagtagaagagccgtcggtgccgaaaccacccgcaataacgctgataaaggaacggttcatcgcctcacacataatgtaagaaaggatagcccccgaagaaccgaccagcgcaccggtcacaatcagcaggtcgttgctgagcataaagcccgcagccgcagccgcccagccggagtacgagttcagcatcgacaccaccactggcatatctgcaccaccgatggaggcgactaaatgccagccgaataccagcgcaattgcggtcattatcagcaatgccagcacttgcaggccgacgctgtccgtgcgaacaaatacaatcagcagcaggaaggaaacgaccagagccgccaggttcattttgtgacggtttggcagcatcaatggtttagacgaaatcttgccacacagtttgccgaacgccaccaccgaacccgtgaacgttaccgccccgatgaagataccgaggaacacttccgtcaggtgaatattgaccagaatcggtgccattcccgcgtcatgatgcagatagctgttaaagccaaccagcactgccgccagacccacgaagctatgcaggatcgccaccagttctggcatttcggtcatttcaactttcttcgccagacggataccaattgccccaccaatgaccatcgccagcaagatccagccaacattacccgtatccggtccaaaaatggttgcgattaacgcaatcgccatcccggcgataccgaagttgttaccctggcgagacgtttcatgtttcgaaagaccggccagactgaagataaacaggatcgcggcaacaatgtatgcagctgtaactaatcctccagacatatgttaccccttaatttttgcggaacattttcagcatgcgctgagtcacggtgaagccaccgaaaatattaatgctggctataagcaccgcgataaaactaaggaagctaacccagccgccctggccaatctgcaacagtgctccgacaacaataatccctgaaatcgcgttggtgaccgacatcaacggtgtatgcagcgcgtgcgatacattccacaccacgtaataaccgacaacgcaggccagcgcgaaaacggtgaagtgcccaaggaattctttcggcgcaacgcttgccatccagccaaaaagaatgattgccagcgccatcaacgcgtatttacgccacggtgagcaggtacatttttcctcagttttcacttccggtgccgctttttgtgccgcctgcggctgagctgatacctgaatcggcggtgccggccaggtaatttcgcccgcacggatcacggtcacgccgcgaatcaccacatcatcaaaatcaacagtgatattgccgtctttctctttgcacaacagtttcagcagattaacgaggtttgtgccgtaaagctgtgaggattgcgtcggcagacggcccggaagatcggtataaccaatcactttgacaccattttccgtagtgaagatttcacccggcacggtgtattcacagttgccgccgttttgggctgccaggtcgacaatcacactgcccgccttcatggagtcaaccatttcacgggtaattagcttcggcgctggtttgcctggaataagcgcggtggtgacaatgatatcgacctcttttgcctgggcggcaaagagttccatttccgctttgatgaacgcgtccgacatcactttggcatagccatcgccgctgccagcttcctctttaaaatccagctcgaggaattccgcgcccatactttgaacttgttctttcacttccgggcgggtgtcgaatgcacgcacaatcgcgccgagactgtttgctgcgccaatggcggccagacctgcaacacccgcaccaatcaccatcacttttgccggtggcactttcccggccgcagtaatttgcccggtaaagaagcgcccaaattcatgtgccgcttcaacaatggcgcgataaccggcgatgttcgccatcgagcttagtgcgtccagcgattgtgcgcgtgagatacgcggcacagagtccatcgccatcacggtcacgttacgttccgcaagtttttgcattaattccggattctgcgcaggccagataaaactcaccagcgttgtcccaggattcagtaacgcaatttcatcatctaacggcgcattgaccttcagaatgatctctgactgccagacgctattcccttctacaatttcagcgcccgcttgcacaaacgctttatcgtcaaaacttgccagttgacccgcgccgctctctaccgcgacggtaaaacccagtttcagcagctgttccactgtttttggcgttgctgcaacacgggtttcattggttaaccgttctcttggtatgccaattgccatggtaaatactccttgaaaagtaaagtgttagatgagtgcgttaattcacacttctgagaaatttcgctaaacgcatcaaaaaagcatagcagacaggcatggtattgctggattaagcaggtaacatcagtgttataggattattaccaaaacattatattcacaggtgtatcgctcaatactgaccatttaaatcatacctgacctccatagcagaaagtcaaaagcctccgaccggaggcttttgacttgagggggatcagcttctattatttctcttgcaggcccagtttcttttccaggtagtgaatgttcgtaccgccgtgctggaaattctcgtcgttcataatgcggatctgcaaatccacattggtcttaatgccatcaatgatcagctcttgcagcgcgtttttcatgcgggcgatcgcatgtttttcctcctgccccgcgcttataagcgaataaaggaagatggccgccccgcagggcagcaggtctgtgaaacagtatagagattcatcggcacaaaggctttgctttttgtcatttattcaaaccggcgcctcgaaccggctccgggcattgccctggccggcactttgcatggggagatgcggatctcgggcagcgttgggtcctggccacgggtgcgcatgatcgtgctcctgtcgttgaggacccggctaggctggcggggttgccttactggttagcagaatgaatcaccgatacgcgagcgaacgtgaagcgactgctgctgcaaaacgtctgcgacctgagcaacaacatgaatggtcttcggtttccgtgtttcgtaaagtctggaaacgcggaagtcccctacgtgctgctgaagttgcccgcaacagagagtggaaccaaccggtgataccacgatactatgactgagagtcaacgccatgagcggcctcatttcttattctgagttacaacagtccgcaccgctgtccggtagctccttccggtgggcgcggggcatgactatcgtcgccgcacttatgactgtcttctttatcatgcaactcgtaggacaggtgccggcagcgcccaacagtcccccggccacggggcctgccaccatacccacgccgaaacaagcgccctgcaccattatgttccggatctgcatcgcaggatgctgctggctaccctgtggaacacctacatctgtattaacgaagcgctaaccgtttttatcaggctctgggaggcagaataaatgatcatatcgtcaattattacctccacggggagagcctgagcaaactggcctcaggcatttgagaagcacacggtcacactgcttccggtagtcaataaaccggtaaaccagcaatagacataagcggctatttaacgaccctgccctgaaccgacgaccgggtcgaatttgctttcgaatttctgccattcatccgcttattatcacttattcaggcgtagcaccaggcgtttaagggcaccaataactgccttaaaaaaattacgccccgccctgccactcatcgcagtactgttgtaattcattaagcattctgccgacatggaagccatcacagacggcatgatgaacctgaatcgccagcggcatcagcaccttgtcgccttgcgtataatatttgcccatggtgaaaacgggggcgaagaagttgtccatattggccacgtttaaatcaaaactggtgaaactcacccagggattggctgagacgaaaaacatattctcaataaaccctttagggaaataggccaggttttcaccgtaacacgccacatcttgcgaatatatgtgtagaaactgccggaaatcgtcgtggtattcactccagagcgatgaaaacgtttcagtttgctcatggaaaacggtgtaacaagggtgaacactatcccatatcaccagctcaccgtctttcattgccatacg

SEQ ID NO: 134 - DNA, 8995 bp, Artificial Sequence
  Description of Artificial Sequence: Synthetic polynucleotide
gaattccggatgagcattcatcaggcgggcaagaatgtgaataaaggccggataaaacttgtgcttatttttctttacggtctttaaaaaggccgtaatatccagctgaacggtctggttataggtacattgagcaactgactgaaatgcctcaaaatgttctttacgatgccattgggatatatcaacggtggtatatccagtgatttttttctccattttagcttccttagctcctgaaaatctcgataactcaaaaaatacgcccggtagtgatcttatttcattatggtgaaagttggaacctcttacgtgccgatcaacgtctcattttcgccaaaagttggcccagggcttcccggtatcaacagggacaccaggatttatttattctgcgaagtgatcttccgtcacaggtatttattcggcgcaaagtgcgtcgggtgatgctgccaacttactgatttagtgtatgatggtgtttttgaggtgctccagtggcttctgtttctatcagctgtccctcctgttcagctactgacggggtggtgcgtaacggcaaaagcaccgccggacatcagcgctagcggagtgtatactggcttactatgttggcactgatgagggtgtcagtgaagtgcttcatgtggcaggagaaaaaaggctgcaccggtgcgtcagcagaatatgtgatacaggatatattccgcttcctcgctcactgactcgctacgctcggtcgttcgactgcggcgagcggaaatggcttacgaacggggcggagatttcctggaagatgccaggaagatacttaacagggaagtgagagggccgcggcaaagccgtttttccataggctccgcccccctgacaagcatcacgaaatctgacgctcaaatcagtggtggcgaaacccgacaggactataaagataccaggcgtttccccctggcggctccctcgtgcgctctcctgttcctgcctttcggtttaccggtgtcattccgctgttatggccgcgtttgtctcattccacgcctgacactcagttccgggtaggcagttcgctccaagctggactgtatgcacgaaccccccgttcagtccgaccgctgcgccttatccggtaactatcgtcttgagtccaacccggaaagacatgcaaaagcaccactggcagcagccactggtaattgatttagaggagttagtcttgaagtcatgcgccggttaaggctaaactgaaaggacaagttttggtgactgcgctcctccaagccagttacctcggttcaaagagttggtagctcagagaaccttcgaaaaaccgccctgcaaggcggttttttcgttttcagagcaagagattacgcgcagaccaaaacgatctcaagaagatcatcttattaatcagataaaatatttctagatttcagtgcaatttatctcttcaaatgtagcacctgaagtcagccccatacgatataagttgtaattctcatgtttgacagcttatcatcgataagctttaatgcggtagtttatcacagttaaattgctaacgcagtcaggcaccgtgtatgaaatctaacaatgcgctcatcgtcatcctcggcaccgtcaccctggatgctgtaggcataggcttggttatgccggtactgccgggcctcttgcgggatttaagctcgggccccctgggcggttctgataacgagtaatcgttaatccgcaaataacgtaaaaacccgcttcggcgggtttttttatggggggagtttagggaaagagcatttgtcagaatatttaagggcgcctgtcactttgcttgatatatgagaattatttaaccttataaatgagaaaaaagcaacgcactttaaataagatacgttgctttttcgattgatgaacacctataattaaactattcatctattatttatgattttttgtatatacaatatttctagtttgttaaagagaattaagaaaataaatctcgaaaataataaagggaaaatcagtttttgatttaaaacaggcggtttaaaccgtttaacgcagctacccgataggcttccgccatcgtcgggtagttaaaggtggtgttgacgaagtactcaatagtgttgccgccacctttctgttccataatcgcctgaccgatatgaataatttcggcagcgcgctcgccaaagcagtgaatacccagaatctcttttgtttcccgatggaacaaaattttcagcgtgcccacgttcatgccgacgatttgtgcgcgtgccagatgtttaaactgggcgcggcccacttcatatggcactttcattgcggtcagctgctgttcggttttgcccacagagctgatttccgggatggtgtaaataccggtagggatatcttcaatcagatgtgcggtggcttcgccttttaccagcgcctgcgcggcaatgcgcccctggtcataggccgccgacgccaggctcggataaccaatcacgtcgcccaccgcgtaaacgtgtggctgtgcggtctgatacatgctgttgaccttcagctgtccgcggctgtcagtttctagcccaatgttctgtaacgccagcgaatcggtattaccggtgcgaccgttggcatagagcaggcagtcagctttcagttttttacccgacttcagatgcatgatcacaccatcgtcacagccttcgatcttctcgtactcttcgttgtgacgaatcactacgccactgttccagaagtgataggagagagaatctgacatctcttgatcgagaaatgccagcaggcgatcgcgggtgttgatcagatccacttttacatccataccgcggaagatcgacgcatattcacagccgatcactccagcaccatagataagtacatggcgcggttcgtggtgcatgctgagaattgagtcgctgtcgtaaatgcgtggatgggtgaaatcaacatctgttggatgatatggacgagagccgcaggcaataacaaatttttcagcggttagtgtttcaacgctgccgtccgggcaatccagcgccaacgtatgctcgtcaacaaagcgagcgtttccctgcaatatttcacagtgattacgttcgtaaaatccctgacgcatgcgcgtttgttgattaatcacgttatcggcatggttaaggatatcggcaaaagaagagcggagcagtcgggaatggtcgctgtaaagtgggttttgattgaattctataatgcggctgacggcgtgacggagagctttcgacgggatggtgccccagtgggtgcaaccgccgccaacattttgataacgctcgataactgcgacgcgcgcaccttgcttaaccaggcccattgcagcgccttcgccgccggggccggaacctattactatggcatcgtaatcgtaggaatgtggggccatggtagggcttacctgttcttgaatagttctttcaaactatgagaatattatatcaagaattgtaggattaagcaactgaaatttttaagtagttaagatctataacttcgtataatgtatgctatacgaagttatgtttaaatcatacctgacctccatagcagaaagtcaaaagcctccgaccggaggcttttgacttgagggggatcagcttctattatttctcttgcaggcccagtttcttttccaggtagtgaatgttcgtaccgccgtgctggaaattctcgtcgttcataatgcggatctgcaaatccacattggtcttaatgccatcaatgatcagctcttgcagcgcgtttttcatgcgggcgatcgcgacatcacgattttcgccatagcagatcagtttaccaatcatgctgtcatagtacggcggcacggtgtaaccggcgtagatgtgagactcccaacgaacgccaaaaccacctggcgcgtgaaaacgcgtgatcttaccagggctcggcagaaaggtattcgggtcctccgcattgatacggcactcgaccgcgtgaccacgaacgtgcacctcttcttgcttgatcgacagcggctgaccagccgcaatgcgcagttgctctttgatcagatcaacgccagtaatcatctcggtcaccgggtgctcaacctggatgcgggtattcatttcaatgaagtaaaactcaccattttcgaacaggaactcaaacgtacccgcaccacggtaaccaatgtccacacacgctttcgcacagcgctcaccgatgtagcgacgcagttccggcgtaatacccggagccggtgcctcttccaccaccttctgatgacggcgttgcatggagcaatcacgttctgccaagtagatcgcattgccctgaccatccgccagaacttggatttcaacgtggcgcggattctccagatacttctccatatacaccatatcgttagagaacgccgctttggcttccgcacgggtcatgctgatgctttgcgccagttccgcatcaccacggacgacacgcataccacggccaccgccaccaccagaggctttgataatgaccgggtagccaatacgtttagcgatggcacggttcttgtccatatcgtcacccagcggaccatcgctgcccggaacacacggcacaccggcctttttcatcgctgcaatggcgctcactttgtcgcccatcaggcgaatcgtctccgccttagggccaatgaagatgaaaccgctacgctccacttgttcagcaaagttagcgttctcgctcaggaaaccgtagcccggatgaatcgccactgcaccggtgatctctgccgcagagatgatggccgggatgttcagatagcttttcacgctcggtgccggaccgatgcaaaccgtttcgtcggccagcagaacatgcttcaggtcgcggtctgcgctggaatgcacggcaacagtcttaatgcccagctctttacacgcgcgcaagatacgcagcgcgatttcaccgcggtttgcaatcacgatcttgtccaacatgttcgcctcgttactcgatcacaaccagcggttcatcgaactcaacaggctggccggattccaccaggatcgctttaacagtaccgctcttatccgcttcaatctggttcatcattttcattgcctcaacgatacacagcgtgtcgccgacattgaccttctggccgacttcgatgaaggcttttgcgtccggcgacggcgtgcgatagaaggtgcccaccatcgggctacgcacgatatgacccgaaatctcggccgctgccggtgcctccatgcttggaacggtcgccggtgcagcggcgttgctctgtgccggctgttgcatcatcggagcggcgtatgcttgctgcataaccggaaagctcgctgccggtgccgcacgggaaatacggacgctctcttcaccttcgctgatctccagctcgctgatgccgctttcttcaaccagttcaatcagtttcttgatcttacgaatgtccatggtttttcctccttcgcctgtggtatgaaatttcacacgcattatatacaaaaaaagcgattcagaccccgttggcaagccgcgtggttaactccacgtgctattatgcctccggctcttggtccgggaccggcggaaccacgacaccctcacgcggtgcttcaggattcggagccggcagattcatcaatttcgccagaatgctcgccagtttcagacgcatttctggacggcgaacgatcatgtcgatggcacctttctcaatcaggaactcgctgcgctggaaaccaggcggcaacttttcgcgaaccgtctgttcaataacacgcggaccagcaaaaccaatcagagccttcggctctgcgatgttcaaatcacccagcatcgcaaagctggcgctgacaccgcccatcgtagggtcggtcaggacggaaatgtacggcaggccgcgttcttgcatcttcgccagggctgccgaggtttttgccatctgcatcaggctcatcagggcctcttgcatacgcgcaccaccgctcgcgctgaaacaaatcagaggacagttatcctccagcgcctgctccacggcacgcacaaagcgtgcgcccaccacggaacccatgctgccacccataaacgcaaactcgaacgccgcagcaacaaccggcataccatacagggtgcctttcataacaaccagtgcgtccttctcaccggtttctttttgtgcagatgccaaacgatccttatacttcttggaatcacggaatttcagaacatctttcggttccagttcgctacccagctcgaccaggctgccctcatccagcaggctatgcagacgattacgagcggtcatacgcatgtgatggtcgcatttcgggcacacttccaggttacgctccagctccgcacgatacaaaacctgaccgcagctatcgcatttggtccagacgccttcagggatgctcgccttgcgggtcggggtgatattggacttaatgcgttcaatccagctcatgattttcctcctttactacgcgtagccatagctcatcaagcgctgatagcgacggtttttcagatcctccgtgctcagcacgtccagatccgccaggtccgccagcagctgggccttcaggctggctgccatcgcctccggattacggtgagcaccgcccagcggttccgggatgatagaatcaatcaacttcagttctttcagacgcggtgcgatgatacccatcgcttccgctgccaatggtgctttatccgcgctcttccacagaatggaagcgcaaccttccgggctaatgacgctgtacgtgctgtattgcagcatgttgaccttatcaccgacaccgatcgccaacgcaccaccgctaccgccctcgccaatcacggtgcaaacgaccggcacacccagacgagacatctcacgcaggttacgtgcgatggcctcgctctgaccacgctcttccgcaccaacgcctgggtacgcacccggcgtatcaatgaacgtgataatcggcatcttaaagcgttcggccatttgcatcagacgcagggccttgcggtagccctccggtgccggcataccaaagttacgacgaatcttttctttcgtctcgcggcctttttgatggccgataatcatcaccggacggccatccaaacgagcaataccgccgacaattgctttatcgtccgcataggcgcggtcgcctgccagttcgtcgaactcgtcaaacgccaggcgcacgtagtccagggtatatgggcgttgtgggtggcgagccaactgggcaatctgccatgcgcccaaatcagcaaagattttgcgagtcagttcaacagacttctcacgcaaacggtggacctcttcgtcgatgttaatgtccagtttctcatcttgacggctaaccgcggtcaggctgtcaatcttcgcttccagttctgcaatcggctgctcgaagtccaggaagttcagggacatgtttttcctcctgccccgcgcttataagcgaataaaggaagatggccgccccgcagggcagcaggtctgtgaaacagtatagagattcatcggcacaaaggctttgctttttgtcatttattcaaaccggcgcctcgaaccggctccgggcattgccctggccggcactttgcatggggagatgcggatctcgggcagcgttgggtcctggccacgggtgcgcatgatcgtgctcctgtcgttgaggacccggctaggctggcggggttgccttactggttagcagaatgaatcaccgatacgcgagcgaacgtgaagcgactgctgctgcaaaacgtctgcgacctgagcaacaacatgaatggtcttcggtttccgtgtttcgtaaagtctggaaacgcggaagtcccctacgtgctgctgaagttgcccgcaacagagagtggaaccaaccggtgataccacgatactatgactgagagtcaacgccatgagcggcctcatttcttattctgagttacaacagtccgcaccgctgtccggtagctccttccggtgggcgcggggcatgactatcgtcgccgcacttatgactgtcttctttatcatgcaactcgtaggacaggtgccggcagcgcccaacagtcccccggccacggggcctgccaccatacccacgccgaaacaagcgccctgcaccattatgttccggatctgcatcgcaggatgctgctggctaccctgtggaacacctacatctgtattaacgaagcgctaaccgtttttatcaggctctgggaggcagaataaatgatcatatcgtcaattattacctccacggggagagcctgagcaaactggcctcaggcatttgagaagcacacggtcacactgcttccggtagtcaataaaccggtaaaccagcaatagacataagcggctatttaacgaccctgccctgaaccgacgaccgggtcgaatttgctttcgaatttctgccattcatccgcttattatcacttattcaggcgtagcaccaggcgtttaagggcaccaataactgccttaaaaaaattacgccccgccctgccactcatcgcagtactgttgtaattcattaagcattctgccgacatggaagccatcacagacggcatgatgaacctgaatcgccagcggcatcagcaccttgtcgccttgcgtataatatttgcccatggtgaaaacgggggcgaagaagttgtccatattggccacgtttaaatcaaaactggtgaaactcacccagggattggctgagacgaaaaacatattctcaataaaccctttagggaaataggccaggttttcaccgtaacacgccacatcttgcgaatatatgtgtagaaactgccggaaatcgtcgtggtattcactccagagcgatgaaaacgtttcagtttgctcatggaaaacggtgtaacaagggtgaacactatcccatatcaccagctcaccgtctttcattgccatacg

SEQ ID NO: 135 - DNA, 10319 bp, Artificial Sequence
  Description of Artificial Sequence: Synthetic polynucleotide
ccttcaactcagcaaaagttcgatttattcaacaaagccacgttgtgtctcaaaatctctgatgttacattgcacaagataaaaatatatcatcatgaacaataaaactgtctgcttacataaacagtaatacaaggggtgttatgagccatattcaacgggaaacgtcttgctcgaggccgcgattaaattccaacatggatgctgatttatatgggtataaatgggctcgcgataatgtcgggcaatcaggtgcgacaatctatcgattgtatgggaagcccgatgcgccagagttgtttctgaaacatggcaaaggtagcgttgccaatgatgttacagatgagatggtcagactaaactggctgacggaatttatgcctcttccgaccatcaagcattttatccgtactcctgatgatgcatggttactcaccactgcgatccccgggaaaacagcattccaggtattagaagaatatcctgattcaggtgaaaatattgttgatgcgctggcagtgttcctgcgccggttgcattcgattcctgtttgtaattgtccttttaacagcgatcgcgtatttcgtctcgctcaggcgcaatcacgaatgaataacggtttggttgatgcgagtgattttgatgacgagcgtaatggctggcctgttgaacaagtctggaaagaaatgcataagcttttgccattctcaccggattcagtcgtcactcatggtgatttctcacttgataaccttatttttgacgaggggaaattaataggttgtattgatgttggacgagtcggaatcgcagaccgataccaggatcttgccatcctatggaactgcctcggtgagttttctccttcattacagaaacggctttttcaaaaatatggtattgataatcctgatatgaataaattgcagtttcatttgatgctcgatgagtttttctaatcgagtcaggcaactatggatgaacgaaatagacagatcgctgagataggtgcctcactgattaagcattggtaactgtcagaccaagtttactcatatatactttagattgatttaaaacttcatttttaatttaaaaggatctaggtgaagatcctttttgataatctcatgaccaaaatcccttaacgtgagttttcgttccactgagcgtcagaccccgtagaaaagatcaaaggatcttcttgagatcctttttttctgcgcgtaatctgctgcttgcaaacaaaaaaaccaccgctaccagcggtggtttgtttgccggatcaagagctaccaactctttttccgaaggtaactggcttcagcagagcgcagataccaaatactgtccttctagtgtagccgtagttaggccaccacttcaagaactctgtagcaccgcctacatacctcgctctgctaatcctgttaccagtggctgctgccagtggcgataagtcgtgtcttaccgggttggactcaagacgatagttaccggataaggcgcagcggtcgggctgaacggggggttcgtgcacacagcccagcttggagcgaacgacctacaccgaactgagatacctacagcgtgagctatgagaaagcgccacgcttcccgaagggagaaaggcggacaggtatccggtaagcggcagggtcggaacaggagagcgcacgagggagcttccagggggaaacgcctggtatctttatagtcctgtcgggtttcgccacctctgacttgagcgtcgatttttgtgatgctcgtcaggggggcggagcctatggaaaaacgccagcaacgcggcctttttacggttcctggccttttgctggccttttgctcacatggtacttggatcctcattagtacagcagacgggcgcgaatggtacccggaatagctttcattgcctgcagcgctttttcggcaacgtcttcgtcggcttcaatatcaataaccacataacccatctgggcggaagtttgcagatattgcgcggcgatgttgacgccctgctcggcgaagattttgttcagcgcagttagcacgcccggacggttttcgtggatgtgcatcagacgacgcccaccgtgcagtggcagcgagacttccgggaagttcaccgcagagagcgttgagccattgtcagaatacttgatcaatttacccgcaacttccaggccgatattctcctgcgcttcctgagtcgaaccgccaatgtgtggcgtcagaaggacgttgtcgaattcacacagcggagaggtaaatggatcgctattggtcgccggttccgtcgggaatacgtcgattgccgcccccgccagatgtttgctcgccagcgcatcacacagcgccggaatatccaccacagtaccgcgcgaagcattaatcagcagcgagccgggcttcattagtgaaatttctttcgcgcccatcatatttttggtggacggattctctggtacatgcagactcaccacatcgctcatattcagcaggtcagaaagatgctgtacctgagtggcgttgcccagcggcagtttattttcaatatcataaaagtaaacatacattcccagcgattcagccagaatgcccaattgcgtaccaatatgaccgtagccgatgatacccagctttttgccgcgcgcttcaaaagaacccgccgccagtttgttccacacgccacggtgcgctttagcattggcttccggcacgccgcgcaatagcagcagcagttcgccaatcaccagctccgcaacagagcgcgtatttgagaacggtgcgttaaataccgggatcccgcgctttgccgccgcatccagatcaacctggtttgttccgatacagaaacagccaatagcgaccagtttttctgcggcgttgatcacgtcttcagtcagatgggtacgggatcgcaggccgatgaagtgggcatcgcggatggattcttttaattgttcatcatccagcgcgcctttgtgaaattcgatgttggtgtaaccagctgcacgaaggctttccagcgccttttggtgcacgccttctaccagcagaaacttaatcttgtctttctccagcgatacctttgccatggtaattctccacgcttataagcgaataaaggaagatggccgccccgcagggcagcaggtctgtgaaacagtatagagattcatcggcacaaaggctttgctttttgtcatttattcaaacctgtacgaaagggtgtatcgctcaatactgaccatttaaatcatacctgacccatgttctttcctgcgttatcccctgattctgtggataaccgtattaccgcctttgagtgagctgataccgctcgccgcagccgaacgaccgagcgcagcgagtcagtgagcgaggaagcggaagagcgcctgatgcggtattttctccttacgcatctgtgcggtatttcacaccgcatatggtgcactctcagtacaatctgctctgatgccgcatagttaagccagtatacactccgctatcgctacgtgactgggtcatggctgcgccccgacacccgccaacacccgctgacgcgccctgacgggcttgtctgctcccggcatccgcttacagacaagctgtgaccgtctccgggagctgcatgtgtcagaggttttcaccgtcatcaccgaaacgcgcgaggcagcagatcaattcgcgcgcgaaggcgaagcggcatgcatttacgttgacaccatcgaatggtgcaaaacctttcgcggtatggcatgatagcgcccggaagagagtcaattcagggtggtgaatgtgaaaccagtaacgttatacgatgtcgcagagtatgccggtgtctcttatcagaccgtttcccgcgtggtgaaccaggccagccacgtttctgcgaaaacgcgggaaaaagtggaagcggcgatggcggagctgaattacattcccaaccgcgtggcacaacaactggcgggcaaacagtcgttgctgattggcgttgccacctccagtctggccctgcacgcgccgtcgcaaattgtcgcggcgattaaatctcgcgccgatcaactgggtgccagcgtggtggtgtcgatggtagaacgaagcggcgtcgaagcctgtaaagcggcggtgcacaatcttctcgcgcaacgcgtcagtgggctgatcattaactatccgctggatgaccaggatgccattgctgtggaagctgcctgcactaatgttccggcgttatttcttgatgtctctgaccagacacccatcaacagtattattttctcccatgaagacggtacgcgactgggcgtggagcatctggtcgcattgggtcaccagcaaatcgcgctgttagcgggcccattaagttctgtctcggcgcgtctgcgtctggctggctggcataaatatctcactcgcaatcaaattcagccgatagcggaacgggaaggcgactggagtgccatgtccggttttcaacaaaccatgcaaatgctgaatgagggcatcgttcccactgcgatgctggttgccaacgatcagatggcgctgggcgcaatgcgcgccattaccgagtccgggctgcgcgttggtgcggatatctcggtagtgggatacgacgataccgaagacagctcatgttatatcccgccgtcaaccaccatcaaacaggattttcgcctgctggggcaaaccagcgtggaccgcttgctgcaactctctcagggccaggcggtgaagggcaatcagctgttgcccgtctcactggtgaaaagaaaaaccaccctggcgcccaatacgcaaaccgcctctccccgcgcgttggccgattcattaatgcagctggcacgacaggtttcccgactggaaagcgggcagtgagcgcaacgcaattaatgtaagttagcgcgaattgatctggtttgacagcttatcatcgactgcacggtgcaccaatgcttctggcgtcaggcagccatcggaagctgtggtatggctgtgcaggtcgtaaatcactgcataattcgtgtcgctcaaggcgcactcccgttctggataatgttttttgcgccgacatcataacggttctggcaaatattctgaaatgagctgttgacaattaatcatccggctcgtataatgtgtggaattgtgagcggataacaatttcacacaggaaacagcgccgctgagaaaaagcgaagcggcactgctctttaacaatttatcagacaatctgtgtgggcactcgaccggaattatcgattaactttattattaaaaattaaagaggtatatattaatgtatcgattaaataaggaggaataaaccatggccggtacgggtcgtttggctggtaaaattgcattgatcaccggtggtgctggtaacattggttccgagctgacccgccgttttctggccgagggtgcgacggttattatcagcggccgtaaccgtgcgaagctgaccgcgctggccgagcgcatgcaagccgaggccggcgtgccggccaagcgcattgatttggaggtgatggatggttccgaccctgtggctgtccgtgccggtatcgaggcaatcgtcgctcgccacggtcagattgacattctggttaacaacgcgggctccgccggtgcccaacgtcgcttggcggaaattccgctgacggaggcagaattgggtccgggtgcggaggagactttgcacgcttcgatcgcgaatctgttgggcatgggttggcacctgatgcgtattgcggctccgcacatgccagttggctccgcagttatcaacgtttcgactattttctcgcgcgcagagtactatggtcgcattccgtacgttaccccgaaggcagcgctgaacgctttgtcccagctggctgcccgcgagctgggcgctcgtggcatccgcgttaacactattttcccaggtcctattgagtccgaccgcatccgtaccgtgtttcaacgtatggatcaactgaagggtcgcccggagggcgacaccgcccatcactttttgaacaccatgcgcctgtgccgcgcaaacgaccaaggcgctttggaacgccgctttccgtccgttggcgatgttgctgatgcggctgtgtttctggcttctgctgagagcgcggcactgtcgggtgagacgattgaggtcacccacggtatggaactgccggcgtgtagcgaaacctccttgttggcgcgtaccgatctgcgtaccatcgacgcgagcggtcgcactaccctgatttgcgctggcgatcaaattgaagaagttatggccctgacgggcatgctgcgtacgtgcggtagcgaagtgattatcggcttccgttctgcggctgccctggcgcaatttgagcaggcagtgaatgaatctcgccgtctggcaggtgcggatttcaccccgccgatcgctttgccgttggacccacgtgacccggccaccattgatgcggttttcgattggggcgcaggcgagaatacgggtggcatccatgcggcggtcattctgccggcaacctcccacgaaccggctccgtgcgtgattgaagtcgatgacgaacgcgtcctgaatttcctggccgatgaaattaccggcaccatcgttattgcgagccgtttggcgcgctattggcaatcccaacgcctgaccccgggtgcccgtgcccgcggtccgcgtgttatctttctgagcaacggtgccgatcaaaatggtaatgtttacggtcgtattcaatctgcggcgatcggtcaattgattcgcgtttggcgtcacgaggcggagttggactatcaacgtgcatccgccgcaggcgatcacgttctgccgccggtttgggcgaaccagattgtccgtttcgctaaccgctccctggaaggtctggagttcgcgtgcgcgtggaccgcacagctgctgcacagccaacgtcatattaacgaaattacgctgaacattccagccaatattagcgcgaccacgggcgcacgttccgccagcgtcggctgggccgagtccttgattggtctgcacctgggcaaggtggctctgattaccggtggttcggcgggcatcggtggtcaaatcggtcgtctgctggccttgtctggcgcgcgtgtgatgctggccgctcgcgatcgccataaattggaacagatgcaagccatgattcaaagcgaattggcggaggttggttataccgatgtggaggaccgtgtgcacatcgctccgggttgcgatgtgagcagcgaggcgcagctggcagatctggtggaacgtacgctgtccgcattcggtaccgtggattatttgattaataacgccggtattgcgggcgtggaggagatggtgatcgacatgccggtggaaggctggcgtcacaccctgtttgccaacctgatttcgaattattcgctgatgcgcaagttggcgccgctgatgaagaagcaaggtagcggttacatcctgaacgtttcttcctattttggcggtgagaaggacgcggcgattccttatccgaaccgcgccgactacgccgtctccaaggctggccaacgcgcgatggcggaagtgttcgctcgtttcctgggtccagagattcagatcaatgctattgccccaggtccggttgaaggcgaccgcctgcgtggtaccggtgagcgtccgggcctgtttgctcgtcgcgcccgtctgatcttggagaataaacgcctgaacgaattgcacgcggctttgattgctgcggcccgcaccgatgagcgctcgatgcacgagttggttgaattgttgctgccgaacgacgtggccgcgttggagcagaacccagcggcccctaccgcgctgcgtgagctggcacgccgcttccgtagcgaaggtgatccggcggcaagctcctcgtccgccttgctgaatcgctccatcgctgccaagctgttggctcgcttgcataacggtggctatgtgctgccggcggatatttttgcaaatctgcctaatccgccggacccgttctttacccgtgcgcaaattgaccgcgaagctcgcaaggtgcgtgatggtattatgggtatgctgtatctgcagcgtatgccaaccgagtttgacgtcgctatggcaaccgtgtactatctggccgatcgtaacgtgagcggcgaaactttccatccgtctggtggtttgcgctacgagcgtaccccgaccggtggcgagctgttcggcctgccatcgccggaacgtctggcggagctggttggtagcacggtgtacctgatcggtgaacacctgaccgagcacctgaacctgctggctcgtgcctatttggagcgctacggtgcccgtcaagtggtgatgattgttgagacggaaaccggtgcggaaaccatgcgtcgtctgttgcatgatcacgtcgaggcaggtcgcctgatgactattgtggcaggtgatcagattgaggcagcgattgaccaagcgatcacgcgctatggccgtccgggtccggtggtgtgcactccattccgtccactgccaaccgttccgctggtcggtcgtaaagactccgattggagcaccgttttgagcgaggcggaatttgcggaactgtgtgagcatcagctgacccaccatttccgtgttgctcgtaagatcgccttgtcggatggcgcgtcgctggcgttggttaccccggaaacgactgcgactagcaccacggagcaatttgctctggcgaacttcatcaagaccaccctgcacgcgttcaccgcgaccatcggtgttgagtcggagcgcaccgcgcaacgtattctgattaaccaggttgatctgacgcgccgcgcccgtgcggaagagccgcgtgacccgcacgagcgtcagcaggaattggaacgcttcattgaagccgttctgctggttaccgctccgctgcctcctgaggcagacacgcgctacgcaggccgtattcaccgcggtcgtgcgattaccgtctaatagaagcttggctgttttggcggatgagagaagattttcagcctgatacagattaaatcagaacgcagaagcggtctgataaaacagaatttgcctggcggcagtagcgcggtggtcccacctgaccccatgccgaactcagaagtgaaacgccgtagcgccgatggtagtgtggggtctccccatgcgagagtagggaactgccaggcatcaaataaaacgaaaggctcagtcgaaagactgggcctttcgttttatctgttgtttgtcggtgaacgctctcctgagtaggacaaatccgccgggagcggatttgaacgttgcgaagcaacggcccggagggtggcgggcaggacgcccgccataaactgccaggcatcaaattaagcagaaggccatcctgacggatggcctttttgcgtttctacaaactctttttgtttatttttctaaatacattcaaatatgtatccgctcatgagacaataaccctgataaatgcttcaataatattgaaaaaggaagagtatgagtattcaacatttccgtgtcgcccttattcccttttttgcggcattttgccttcctgtttttgctcacccagaaacgctggtgaaagtaaaagatgctgaagatcagttgggtgcacgagtgggttacatcgaactggatctcaacagcggtaagatccttgagagttttcgccccgaagaacgttttccaatgatgagcacttttaaagttctgctatgtggcgcggtattatcccgtgttgacgccgggcaagagcaactcggtcgccgcatacactattctcagaatgacttggttgagtactcaccagtcacagaaaagcatcttacggatggcatgacagtaagagaattatgcagtgctgccataaccatgagtgataacactgcggccaacttacttctgacaacgatcggaggaccgaaggagctaaccgcttttttgcacaacatgggggatcatgtaactcgccttgatcgttgggaaccggagctgaatgaagccataccaaacgacgagcgtgacaccacgatgcctgtagcaatggcaacaacgttgcgcaaactattaactggcgaactacttactctagcttcccggcaacaattaatagactggatggaggcggataaagttgcaggaccacttctgcgctcggcccttccggctggctggtttattgctgataaatctggagccggtgagcgtgggtctcgcggtatcattgcagcactggggccagatggtaagccctcccgtatcgtagttatctacacgacgg

SEQ ID NO: 136 - DNA, 5543 bp, Artificial Sequence
  Description of Artificial Sequence: Synthetic polynucleotide
gtttgacagcttatcatcgactgcacggtgcaccaatgcttctggcgtcaggcagccatcggaagctgtggtatggctgtgcaggtcgtaaatcactgcataattcgtgtcgctcaaggcgcactcccgttctggataatgttttttgcgccgacatcataacggttctggcaaatattctgaaatgagctgttgacaattaatcatccggctcgtataatgtgtggaattgtgagcggataacaatttcacacaggaaacagcgccgctgagaaaaagcgaagcggcactgctctttaacaatttatcagacaatctgtgtgggcactcgaccggaattatcgattaactttattattaaaaattaaagaggtatatattaatgtatcgattaaataaggaggaataaaccatgggatctaagcgtcgtgtagttgtgaccggactgggcatgttgtctcctgtcggcaataccgtagagtctacctggaaagctctgcttgccggtcagagtggcatcagcctaatcgaccatttcgatactagcgcctatgcaacgaaatttgctggcttagtaaaggattttaactgtgaggacattatctcgcgcaaagaacagcgcaagatggatgccttcattcaatatggaattgtcgctggcgttcaggccatgcaggattctggccttgaaataacggaagagaacgcaacccgcattggtgccgcaattggctccgggattggcggcctcggactgatcgaagaaaaccacacatctctgatgaacggtggtccacgtaagatcagcccattcttcgttccgtcaacgattgtgaacatggtggcaggtcatctgactatcatgtatggcctgcgtggcccgagcatctctatcgcgactgcctgtacttccggcgtgcacaacattggccatgctgcgcgtattatcgcgtatggcgatgctgacgtgatggttgcaggtggcgcagagaaagccagtacgccgctgggcgttggtggttttggcgcggcacgtgcattatctacccgcaatgataacccgcaagcggcgagccgcccgtgggataaagagcgtgatggtttcgtactgggcgatggtgccggtatgctggtacttgaagagtacgaacacgcgaaaaaacgcggtgcgaaaatttacgctgaactcgtcggctttggtatgagcagcgatgcttatcatatgacgtcaccgccagaaaatggcgcaggcgcagctctggcgatggcaaatgctctgcgtgatgcaggcattgaagcgagtcagattggctacgttaacgcgcacggtacttctacgccggctggcgataaagctgaagcgcaggcggtgaaaaccatcttcggtgaagctgcaagccgtgtgttggtaagctccacgaaatctatgaccggtcacctgttaggtgcggcgggtgcagtagaatctatctactccatcctggcgctgcgcgatcaggctgttccgccaaccatcaacctggataacccggatgaaggttgcgatctggatttcgtaccgcacgaagcgcgtcaggttagcggaatggaatacactctgtgtaactccttcggcttcggtggcactaatggttctttgatctttaaaaagatctaattactgcagctggtaccatatgggaattcgaagcttggctgttttggcggatgagagaagattttcagcctgatacagattaaatcagaacgcagaagcggtctgataaaacagaatttgcctggcggcagtagcgcggtggtcccacctgaccccatgccgaactcagaagtgaaacgccgtagcgccgatggtagtgtggggtctccccatgcgagagtagggaactgccaggcatcaaataaaacgaaaggctcagtcgaaagactgggcctttcgttttatctgttgtttgtcggtgaacgctctcctgagtaggacaaatccgccgggagcggatttgaacgttgcgaagcaacggcccggagggtggcgggcaggacgcccgccataaactgccaggcatcaaattaagcagaaggccatcctgacggatggcctttttgcgtttctacaaactctttttgtttatttttctaaatacattcaaatatgtatccgctcatgagacaataaccctgataaatgcttcaataatattgaaaaaggaagagtatgagtattcaacatttccgtgtcgcccttattcccttttttgcggcattttgccttcctgtttttgctcacccagaaacgctggtgaaagtaaaagatgctgaagatcagttgggtgcacgagtgggttacatcgaactggatctcaacagcggtaagatccttgagagttttcgccccgaagaacgttttccaatgatgagcacttttaaagttctgctatgtggcgcggtattatcccgtgttgacgccgggcaagagcaactcggtcgccgcatacactattctcagaatgacttggttgagtactcaccagtcacagaaaagcatcttacggatggcatgacagtaagagaattatgcagtgctgccataaccatgagtgataacactgcggccaacttacttctgacaacgatcggaggaccgaaggagctaaccgcttttttgcacaacatgggggatcatgtaactcgccttgatcgttgggaaccggagctgaatgaagccataccaaacgacgagcgtgacaccacgatgcctgtagcaatggcaacaacgttgcgcaaactattaactggcgaactacttactctagcttcccggcaacaattaatagactggatggaggcggataaagttgcaggaccacttctgcgctcggcccttccggctggctggtttattgctgataaatctggagccggtgagcgtgggtctcgcggtatcattgcagcactggggccagatggtaagccctcccgtatcgtagttatctacacgacggggagtcaggcaactatggatgaacgaaatagacagatcgctgagataggtgcctcactgattaagcattggtaactgtcagaccaagtttactcatatatactttagattgatttaaaacttcatttttaatttaaaaggatctaggtgaagatcctttttgataatctcatgaccaaaatcccttaacgtgagttttcgttccactgagcgtcagaccccgtagaaaagatcaaaggatcttcttgagatcctttttttctgcgcgtaatctgctgcttgcaaacaaaaaaaccaccgctaccagcggtggtttgtttgccggatcaagagctaccaactctttttccgaaggtaactggcttcagcagagcgcagataccaaatactgtccttctagtgtagccgtagttaggccaccacttcaagaactctgtagcaccgcctacatacctcgctctgctaatcctgttaccagtggctgctgccagtggcgataagtcgtgtcttaccgggttggactcaagacgatagttaccggataaggcgcagcggtcgggctgaacggggggttcgtgcacacagcccagcttggagcgaacgacctacaccgaactgagatacctacagcgtgagctatgagaaagcgccacgcttcccgaagggagaaaggcggacaggtatccggtaagcggcagggtcggaacaggagagcgcacgagggagcttccagggggaaacgcctggtatctttatagtcctgtcgggtttcgccacctctgacttgagcgtcgatttttgtgatgctcgtcaggggggcggagcctatggaaaaacgccagcaacgcggcctttttacggttcctggccttttgctggccttttgctcacatgttctttcctgcgttatcccctgattctgtggataaccgtattaccgcctttgagtgagctgataccgctcgccgcagccgaacgaccgagcgcagcgagtcagtgagcgaggaagcggaagagcgcctgatgcggtattttctccttacgcatctgtgcggtatttcacaccgcatatggtgcactctcagtacaatctgctctgatgccgcatagttaagccagtatacactccgctatcgctacgtgactgggtcatggctgcgccccgacacccgccaacacccgctgacgcgccctgacgggcttgtctgctcccggcatccgcttacagacaagctgtgaccgtctccgggagctgcatgtgtcagaggttttcaccgtcatcaccgaaacgcgcgaggcagcagatcaattcgcgcgcgaaggcgaagcggcatgcatttacgttgacaccatcgaatggtgcaaaacctttcgcggtatggcatgatagcgcccggaagagagtcaattcagggtggtgaatgtgaaaccagtaacgttatacgatgtcgcagagtatgccggtgtctcttatcagaccgtttcccgcgtggtgaaccaggccagccacgtttctgcgaaaacgcgggaaaaagtggaagcggcgatggcggagctgaattacattcccaaccgcgtggcacaacaactggcgggcaaacagtcgttgctgattggcgttgccacctccagtctggccctgcacgcgccgtcgcaaattgtcgcggcgattaaatctcgcgccgatcaactgggtgccagcgtggtggtgtcgatggtagaacgaagcggcgtcgaagcctgtaaagcggcggtgcacaatcttctcgcgcaacgcgtcagtgggctgatcattaactatccgctggatgaccaggatgccattgctgtggaagctgcctgcactaatgttccggcgttatttcttgatgtctctgaccagacacccatcaacagtattattttctcccatgaagacggtacgcgactgggcgtggagcatctggtcgcattgggtcaccagcaaatcgcgctgttagcgggcccattaagttctgtctcggcgcgtctgcgtctggctggctggcataaatatctcactcgcaatcaaattcagccgatagcggaacgggaaggcgactggagtgccatgtccggttttcaacaaaccatgcaaatgctgaatgagggcatcgttcccactgcgatgctggttgccaacgatcagatggcgctgggcgcaatgcgcgccattaccgagtccgggctgcgcgttggtgcggatatctcggtagtgggatacgacgataccgaagacagctcatgttatatcccgccgtcaaccaccatcaaacaggattttcgcctgctggggcaaaccagcgtggaccgcttgctgcaactctctcagggccaggcggtgaagggcaatcagctgttgcccgtctcactggtgaaaagaaaaaccaccctggcgcccaatacgcaaaccgcctctccccgcgcgttggccgattcattaatgcagctggcacgacaggtttcccgactggaaagcgggcagtgagcgcaacgcaattaatgtgagttagcgcgaattgatctg

SEQ ID NO: 137 - DNA, 6620 bp, Artificial Sequence
  Description of Artificial Sequence: Synthetic polynucleotide
cgcggtatcattgcagcactggggccagatggtaagccctcccgtatcgtagttatctacacgacggggagtcaggcaactatggatgaacgaaatagacagatcgctgagataggtgcctcactgattaagcattggtaactgtcagaccaagtttactcatatatactttagattgatttaaaacttcatttttaatttaaaaggatctaggtgaagatcctttttgataatctcatgaccaaaatcccttaacgtgagttttcgttccactgagcgtcagaccccttaataagatgatcttcttgagatcgttttggtctgcgcgtaatctcttgctctgaaaacgaaaaaaccgccttgcagggcggtttttcgaaggttctctgagctaccaactctttgaaccgaggtaactggcttggaggagcgcagtcaccaaaacttgtcctttcagtttagccttaaccggcgcatgacttcaagactaactcctctaaatcaattaccagtggctgctgccagtggtgcttttgcatgtctttccgggttggactcaagacgatagttaccggataaggcgcagcggtcggactgaacggggggttcgtgcatacagtccagcttggagcgaactgcctacccggaactgagtgtcaggcgtggaatgagacaaacgcggccataacagcggaatgacaccggtaaaccgaaaggcaggaacaggagagcgcacgagggagccgccagggggaaacgcctggtatctttatagtcctgtcgggtttcgccaccactgatttgagcgtcagatttcgtgatgcttgtcaggggggcggagcctatggaaaaacggctttgccgcggccctctcacttccctgttaagtatcttcctggcatcttccaggaaatctccgccccgttcgtaagccatttccgctcgccgcagtcgaacgaccgagcgtagcgagtcagtgagcgaggaagcggaatatatcctgtatcacatattctgctgacgcaccggtgcagccttttttctcctgccacatgaagcacttcactgacaccctcatcagtgccaacatagtaagccagtatacactccgctagcgctgaggtctgcctcgtgaagaaggtgttgctgactcataccaggcctgaatcgccccatcatccagccagaaagtgagggagccacggttgatgagagctttgttgtaggtggaccagttggtgattttgaacttttgctttgccacggaacggtctgcgttgtcgggaagatgcgtgatctgatccttcaactcagcaaaagttcgatttattcaacaaagccacgttgtgtctcaaaatctctgatgttacattgcacaagataaaaatatatcatcatgaacaataaaactgtctgcttacataaacagtaatacaaggggtgttatgagccatattcaacgggaaacgtcttgctcgaggccgcgattaaattccaacatggatgctgatttatatgggtataaatgggctcgcgataatgtcgggcaatcaggtgcgacaatctatcgattgtatgggaagcccgatgcgccagagttgtttctgaaacatggcaaaggtagcgttgccaatgatgttacagatgagatggtcagactaaactggctgacggaatttatgcctcttccgaccatcaagcattttatccgtactcctgatgatgcatggttactcaccactgcgatccccgggaaaacagcattccaggtattagaagaatatcctgattcaggtgaaaatattgttgatgcgctggcagtgttcctgcgccggttgcattcgattcctgtttgtaattgtccttttaacagcgatcgcgtatttcgtctcgctcaggcgcaatcacgaatgaataacggtttggttgatgcgagtgattttgatgacgagcgtaatggctggcctgttgaacaagtctggaaagaaatgcataagcttttgccattctcaccggattcagtcgtcactcatggtgatttctcacttgataaccttatttttgacgaggggaaattaataggttgtattgatgttggacgagtcggaatcgcagaccgataccaggatcttgccatcctatggaactgcctcggtgagttttctccttcattacagaaacggctttttcaaaaatatggtattgataatcctgatatgaataaattgcagtttcatttgatgctcgatgagtttttctaatcagaattggttaattggttgtaacactggcagagcattacgctgacttgacgcggaagagccgatgcttgacgcggaagagccgatgccagtccagttacgctggagtctgaggctcgtcctgaatgatatcaagcttgattcgtctgtggtatggctgtgcaggtcgtaaatcactgcataattcgtgtcgctcaaggcgcactcccgttctggataatgttttttgcgccgacatcataacggttctggcaaatattctgaaatgagctgttgacaattaatcatccggctcgtataatgtgtggaattgtgagcggataacaatttcacacaggaaacagcgccgctgagaaaaagcgaagcggcactgctctttaacaatttatcagacaatctgtgtgggcactcgaccggaattatcgattaactttattattaaaaattaaagaggtatatattaatgtatcgattaaataaggaggaataaaccatggccggtacgggtcgtttggctggtaaaattgcattgatcaccggtggtgctggtaacattggttccgagctgacccgccgttttctggccgagggtgcgacggttattatcagcggccgtaaccgtgcgaagctgaccgcgctggccgagcgcatgcaagccgaggccggcgtgccggccaagcgcattgatttggaggtgatggatggttccgaccctgtggctgtccgtgccggtatcgaggcaatcgtcgctcgccacggtcagattgacattctggttaacaacgcgggctccgccggtgcccaacgtcgcttggcggaaattccgctgacggaggcagaattgggtccgggtgcggaggagactttgcacgcttcgatcgcgaatctgttgggcatgggttggcacctgatgcgtattgcggctccgcacatgccagttggctccgcagttatcaacgtttcgactattttctcgcgcgcagagtactatggtcgcattccgtacgttaccccgaaggcagcgctgaacgctttgtcccagctggctgcccgcgagctgggcgctcgtggcatccgcgttaacactattttcccaggtcctattgagtccgaccgcatccgtaccgtgtttcaacgtatggatcaactgaagggtcgcccggagggcgacaccgcccatcactttttgaacaccatgcgcctgtgccgcgcaaacgaccaaggcgctttggaacgccgctttccgtccgttggcgatgttgctgatgcggctgtgtttctggcttctgctgagagcgcggcactgtcgggtgagacgattgaggtcacccacggtatggaactgccggcgtgtagcgaaacctccttgttggcgcgtaccgatctgcgtaccatcgacgcgagcggtcgcactaccctgatttgcgctggcgatcaaattgaagaagttatggccctgacgggcatgctgcgtacgtgcggtagcgaagtgattatcggcttccgttctgcggctgccctggcgcaatttgagcaggcagtgaatgaatctcgccgtctggcaggtgcggatttcaccccgccgatcgctttgccgttggacccacgtgacccggccaccattgatgcggttttcgattggggcgcaggcgagaatacgggtggcatccatgcggcggtcattctgccggcaacctcccacgaaccggctccgtgcgtgattgaagtcgatgacgaacgcgtcctgaatttcctggccgatgaaattaccggcaccatcgttattgcgagccgtttggcgcgctattggcaatcccaacgcctgaccccgggtgcccgtgcccgcggtccgcgtgttatctttctgagcaacggtgccgatcaaaatggtaatgtttacggtcgtattcaatctgcggcgatcggtcaattgattcgcgtttggcgtcacgaggcggagttggactatcaacgtgcatccgccgcaggcgatcacgttctgccgccggtttgggcgaaccagattgtccgtttcgctaaccgctccctggaaggtctggagttcgcgtgcgcgtggaccgcacagctgctgcacagccaacgtcatattaacgaaattacgctgaacattccagccaatattagcgcgaccacgggcgcacgttccgccagcgtcggctgggccgagtccttgattggtctgcacctgggcaaggtggctctgattaccggtggttcggcgggcatcggtggtcaaatcggtcgtctgctggccttgtctggcgcgcgtgtgatgctggccgctcgcgatcgccataaattggaacagatgcaagccatgattcaaagcgaattggcggaggttggttataccgatgtggaggaccgtgtgcacatcgctccgggttgcgatgtgagcagcgaggcgcagctggcagatctggtggaacgtacgctgtccgcattcggtaccgtggattatttgattaataacgccggtattgcgggcgtggaggagatggtgatcgacatgccggtggaaggctggcgtcacaccctgtttgccaacctgatttcgaattattcgctgatgcgcaagttggcgccgctgatgaagaagcaaggtagcggttacatcctgaacgtttcttcctattttggcggtgagaaggacgcggcgattccttatccgaaccgcgccgactacgccgtctccaaggctggccaacgcgcgatggcggaagtgttcgctcgtttcctgggtccagagattcagatcaatgctattgccccaggtccggttgaaggcgaccgcctgcgtggtaccggtgagcgtccgggcctgtttgctcgtcgcgcccgtctgatcttggagaataaacgcctgaacgaattgcacgcggctttgattgctgcggcccgcaccgatgagcgctcgatgcacgagttggttgaattgttgctgccgaacgacgtggccgcgttggagcagaacccagcggcccctaccgcgctgcgtgagctggcacgccgcttccgtagcgaaggtgatccggcggcaagctcctcgtccgccttgctgaatcgctccatcgctgccaagctgttggctcgcttgcataacggtggctatgtgctgccggcggatatttttgcaaatctgcctaatccgccggacccgttctttacccgtgcgcaaattgaccgcgaagctcgcaaggtgcgtgatggtattatgggtatgctgtatctgcagcgtatgccaaccgagtttgacgtcgctatggcaaccgtgtactatctggccgatcgtaacgtgagcggcgaaactttccatccgtctggtggtttgcgctacgagcgtaccccgaccggtggcgagctgttcggcctgccatcgccggaacgtctggcggagctggttggtagcacggtgtacctgatcggtgaacacctgaccgagcacctgaacctgctggctcgtgcctatttggagcgctacggtgcccgtcaagtggtgatgattgttgagacggaaaccggtgcggaaaccatgcgtcgtctgttgcatgatcacgtcgaggcaggtcgcctgatgactattgtggcaggtgatcagattgaggcagcgattgaccaagcgatcacgcgctatggccgtccgggtccggtggtgtgcactccattccgtccactgccaaccgttccgctggtcggtcgtaaagactccgattggagcaccgttttgagcgaggcggaatttgcggaactgtgtgagcatcagctgacccaccatttccgtgttgctcgtaagatcgccttgtcggatggcgcgtcgctggcgttggttaccccggaaacgactgcgactagcaccacggagcaatttgctctggcgaacttcatcaagaccaccctgcacgcgttcaccgcgaccatcggtgttgagtcggagcgcaccgcgcaacgtattctgattaaccaggttgatctgacgcgccgcgcccgtgcggaagagccgcgtgacccgcacgagcgtcagcaggaattggaacgcttcattgaagccgttctgctggttaccgctccgctgcctcctgaggcagacacgcgctacgcaggccgtattcaccgcggtcgtgcgattaccgtctaatagaagcttggctgttttggcggatgagagaagattttcagcctgatacagattaaatcagaacgcagaagcggtctgataaaacagaatttgcctggcggcagtagcgcggtggtcccacctgaccccatgccgaactcagaagtgaaacgacgaattctctagatatcgctcaatactgaccatttaaatcatacctgacc

SEQ ID NO: 138 - DNA, 10944 bp, Artificial Sequence
  Description of Artificial Sequence: Synthetic polynucleotide
cgcggtatcattgcagcactggggccagatggtaagccctcccgtatcgtagttatctacacgacggggagtcaggcaactatggatgaacgaaatagacagatcgctgagataggtgcctcactgattaagcattggtaactgtcagaccaagtttactcatatatactttagattgatttaaaacttcatttttaatttaaaaggatctaggtgaagatcctttttgataatctcatgaccaaaatcccttaacgtgagttttcgttccactgagcgtcagaccccttaataagatgatcttcttgagatcgttttggtctgcgcgtaatctcttgctctgaaaacgaaaaaaccgccttgcagggcggtttttcgaaggttctctgagctaccaactctttgaaccgaggtaactggcttggaggagcgcagtcaccaaaacttgtcctttcagtttagccttaaccggcgcatgacttcaagactaactcctctaaatcaattaccagtggctgctgccagtggtgcttttgcatgtctttccgggttggactcaagacgatagttaccggataaggcgcagcggtcggactgaacggggggttcgtgcatacagtccagcttggagcgaactgcctacccggaactgagtgtcaggcgtggaatgagacaaacgcggccataacagcggaatgacaccggtaaaccgaaaggcaggaacaggagagcgcacgagggagccgccagggggaaacgcctggtatctttatagtcctgtcgggtttcgccaccactgatttgagcgtcagatttcgtgatgcttgtcaggggggcggagcctatggaaaaacggctttgccgcggccctctcacttccctgttaagtatcttcctggcatcttccaggaaatctccgccccgttcgtaagccatttccgctcgccgcagtcgaacgaccgagcgtagcgagtcagtgagcgaggaagcggaatatatcctgtatcacatattctgctgacgcaccggtgcagccttttttctcctgccacatgaagcacttcactgacaccctcatcagtgccaacatagtaagccagtatacactccgctagcgctgaggtctgcctcgtgaagaaggtgttgctgactcataccaggcctgaatcgccccatcatccagccagaaagtgagggagccacggttgatgagagctttgttgtaggtggaccagttggtgattttgaacttttgctttgccacggaacggtctgcgttgtcgggaagatgcgtgatctgatccttcaactcagcaaaagttcgatttattcaacaaagccacgttgtgtctcaaaatctctgatgttacattgcacaagataaaaatatatcatcatgaacaataaaactgtctgcttacataaacagtaatacaaggggtgttatgagccatattcaacgggaaacgtcttgctcgaggccgcgattaaattccaacatggatgctgatttatatgggtataaatgggctcgcgataatgtcgggcaatcaggtgcgacaatctatcgattgtatgggaagcccgatgcgccagagttgtttctgaaacatggcaaaggtagcgttgccaatgatgttacagatgagatggtcagactaaactggctgacggaatttatgcctcttccgaccatcaagcattttatccgtactcctgatgatgcatggttactcaccactgcgatccccgggaaaacagcattccaggtattagaagaatatcctgattcaggtgaaaatattgttgatgcgctggcagtgttcctgcgccggttgcattcgattcctgtttgtaattgtccttttaacagcgatcgcgtatttcgtctcgctcaggcgcaatcacgaatgaataacggtttggttgatgcgagtgattttgatgacgagcgtaatggctggcctgttgaacaagtctggaaagaaatgcataagcttttgccattctcaccggattcagtcgtcactcatggtgatttctcacttgataaccttatttttgacgaggggaaattaataggttgtattgatgttggacgagtcggaatcgcagaccgataccaggatcttgccatcctatggaactgcctcggtgagttttctccttcattacagaaacggctttttcaaaaatatggtattgataatcctgatatgaataaattgcagtttcatttgatgctcgatgagtttttctaatcagaattggttaattggttgtaacactggcagagcattacgctgacttgacgcggaagagccgatgccagtccagttacgctggagtctgaggctcgtcctgaatgatatcaagcttgattcgtctgtggtatggctgtgcaggtcgtaaatcactgcataattcgtgtcgctcaaggcgcactcccgttctggataatgttttttgcgccgacatcataacggttctggcaaatattctgaaatgagctgttgacaattaatcatccggctcgtataatgtgtggaattgtgagcggataacaatttcacacaggaaacagcgccgctgagaaaaagcgaagcggcactgctctttaacaatttatcagacaatctgtgtgggcactcgaccggaattatcgattaactttattattaaaaattaaagaggtatatattaatgtatcgattaaataaggaggaataaaccatggccggtacgggtcgtttggctggtaaaattgcattgatcaccggtggtgctggtaacattggttccgagctgacccgccgttttctggccgagggtgcgacggttattatcagcggccgtaaccgtgcgaagctgaccgcgctggccgagcgcatgcaagccgaggccggcgtgccggccaagcgcattgatttggaggtgatggatggttccgaccctgtggctgtccgtgccggtatcgaggcaatcgtcgctcgccacggtcagattgacattctggttaacaacgcgggctccgccggtgcccaacgtcgcttggcggaaattccgctgacggaggcagaattgggtccgggtgcggaggagactttgcacgcttcgatcgcgaatctgttgggcatgggttggcacctgatgcgtattgcggctccgcacatgccagttggctccgcagttatcaacgtttcgactattttctcgcgcgcagagtactatggtcgcattccgtacgttaccccgaaggcagcgctgaacgctttgtcccagctggctgcccgcgagctgggcgctcgtggcatccgcgttaacactattttcccaggtcctattgagtccgaccgcatccgtaccgtgtttcaacgtatggatcaactgaagggtcgcccggagggcgacaccgcccatcactttttgaacaccatgcgcctgtgccgcgcaaacgaccaaggcgctttggaacgccgctttccgtccgttggcgatgttgctgatgcggctgtgtttctggcttctgctgagagcgcggcactgtcgggtgagacgattgaggtcacccacggtatggaactgccggcgtgtagcgaaacctccttgttggcgcgtaccgatctgcgtaccatcgacgcgagcggtcgcactaccctgatttgcgctggcgatcaaattgaagaagttatggccctgacgggcatgctgcgtacgtgcggtagcgaagtgattatcggcttccgttctgcggctgccctggcgcaatttgagcaggcagtgaatgaatctcgccgtctggcaggtgcggatttcaccccgccgatcgctttgccgttggacccacgtgacccggccaccattgatgcggttttcgattggggcgcaggcgagaatacgggtggcatccatgcggcggtcattctgccggcaacctcccacgaaccggctccgtgcgtgattgaagtcgatgacgaacgcgtcctgaatttcctggccgatgaaattaccggcaccatcgttattgcgagccgtttggcgcgctattggcaatcccaacgcctgaccccgggtgcccgtgcccgcggtccgcgtgttatctttctgagcaacggtgccgatcaaaatggtaatgtttacggtcgtattcaatctgcggcgatcggtcaattgattcgcgtttggcgtcacgaggcggagttggactatcaacgtgcatccgccgcaggcgatcacgttctgccgccggtttgggcgaaccagattgtccgtttcgctaaccgctccctggaaggtctggagttcgcgtgcgcgtggaccgcacagctgctgcacagccaacgtcatattaacgaaattacgctgaacattccagccaatattagcgcgaccacgggcgcacgttccgccagcgtcggctgggccgagtccttgattggtctgcacctgggcaaggtggctctgattaccggtggttcggcgggcatcggtggtcaaatcggtcgtctgctggccttgtctggcgcgcgtgtgatgctggccgctcgcgatcgccataaattggaacagatgcaagccatgattcaaagcgaattggcggaggttggttataccgatgtggaggaccgtgtgcacatcgctccgggttgcgatgtgagcagcgaggcgcagctggcagatctggtggaacgtacgctgtccgcattcggtaccgtggattatttgattaataacgccggtattgcgggcgtggaggagatggtgatcgacatgccggtggaaggctggcgtcacaccctgtttgccaacctgatttcgaattattcgctgatgcgcaagttggcgccgctgatgaagaagcaaggtagcggttacatcctgaacgtttcttcctattttggcggtgagaaggacgcggcgattccttatccgaaccgcgccgactacgccgtctccaaggctggccaacgcgcgatggcggaagtgttcgctcgtttcctgggtccagagattcagatcaatgctattgccccaggtccggttgaaggcgaccgcctgcgtggtaccggtgagcgtccgggcctgtttgctcgtcgcgcccgtctgatcttggagaataaacgcctgaacgaattgcacgcggctttgattgctgcggcccgcaccgatgagcgctcgatgcacgagttggttgaattgttgctgccgaacgacgtggccgcgttggagcagaacccagcggcccctaccgcgctgcgtgagctggcacgccgcttccgtagcgaaggtgatccggcggcaagctcctcgtccgccttgctgaatcgctccatcgctgccaagctgttggctcgcttgcataacggtggctatgtgctgccggcggatatttttgcaaatctgcctaatccgccggacccgttctttacccgtgcgcaaattgaccgcgaagctcgcaaggtgcgtgatggtattatgggtatgctgtatctgcagcgtatgccaaccgagtttgacgtcgctatggcaaccgtgtactatctggccgatcgtaacgtgagcggcgaaactttccatccgtctggtggtttgcgctacgagcgtaccccgaccggtggcgagctgttcggcctgccatcgccggaacgtctggcggagctggttggtagcacggtgtacctgatcggtgaacacctgaccgagcacctgaacctgctggctcgtgcctatttggagcgctacggtgcccgtcaagtggtgatgattgttgagacggaaaccggtgcggaaaccatgcgtcgtctgttgcatgatcacgtcgaggcaggtcgcctgatgactattgtggcaggtgatcagattgaggcagcgattgaccaagcgatcacgcgctatggccgtccgggtccggtggtgtgcactccattccgtccactgccaaccgttccgctggtcggtcgtaaagactccgattggagcaccgttttgagcgaggcggaatttgcggaactgtgtgagcatcagctgacccaccatttccgtgttgctcgtaagatcgccttgtcggatggcgcgtcgctggcgttggttaccccggaaacgactgcgactagcaccacggagcaatttgctctggcgaacttcatcaagaccaccctgcacgcgttcaccgcgaccatcggtgttgagtcggagcgcaccgcgcaacgtattctgattaaccaggttgatctgacgcgccgcgcccgtgcggaagagccgcgtgacccgcacgagcgtcagcaggaattggaacgcttcattgaagccgttctgctggttaccgctccgctgcctcctgaggcagacacgcgctacgcaggccgtattcaccgcggtcgtgcgattaccgtctaatagaagcttggctgttttggcggatgagagaagattttcagcctgatacagattaaatcagaacgcagaagcggtctgataaaacagaatttgcctggcggcagtagcgcggtggtcccacctgaccccatgccgaactcagaagtgaaacgacgaattctctagaaagtataggaacttctgaaggggggacagctgtctcaaatgtctcggaatcgctgacgattcccaggtttctccggcaagcatagcgcatggcgtctccatgcgagaatgtcgcgcttgccggataaaaggggagccgctatcggaatggacgcaagccacggccgcagcaggtgcggtcgagggcttccagccagttccagggcagatgtgccggcagaccctcccgctttgggggaggcgcaagccgggtccattcggatagcatctccccatgcaaagtgccggccagggcaatgcccggagccggttcgaggcgccggtttgaataaatgacaaaaagcaaagcctttgtgccgatgaatctctatactgtttcacagacctgctgccctgcggggcggccatcttcctttattcgcttataagcgcggggcaggaggaaaaacatgtccctgaacttcctggacttcgagcagccgattgcagaactggaagcgaagattgacagcctgaccgcggttagccgtcaagatgagaaactggacattaacatcgacgaagaggtccaccgtttgcgtgagaagtctgttgaactgactcgcaaaatctttgctgatttgggcgcatggcagattgcccagttggctcgccacccacaacgcccatataccctggactacgtgcgcctggcgtttgacgagttcgacgaactggcaggcgaccgcgcctatgcggacgataaagcaattgtcggcggtattgctcgtttggatggccgtccggtgatgattatcggccatcaaaaaggccgcgagacgaaagaaaagattcgtcgtaactttggtatgccggcaccggagggctaccgcaaggccctgcgtctgatgcaaatggccgaacgctttaagatgccgattatcacgttcattgatacgccgggtgcgtacccaggcgttggtgcggaagagcgtggtcagagcgaggccatcgcacgtaacctgcgtgagatgtctcgtctgggtgtgccggtcgtttgcaccgtgattggcgagggcggtagcggtggtgcgttggcgatcggtgtcggtgataaggtcaacatgctgcaatacagcacgtacagcgtcattagcccggaaggttgcgcttccattctgtggaagagcgcggataaagcaccattggcagcggaagcgatgggtatcatcgcaccgcgtctgaaagaactgaagttgattgattctatcatcccggaaccgctgggcggtgctcaccgtaatccggaggcgatggcagccagcctgaaggcccagctgctggcggacctggcggatctggacgtgctgagcacggaggatctgaaaaaccgtcgctatcagcgcttgatgagctatggctacgcgtagtaaaggaggaaaatcatgagctggattgaacgcattaagtccaatatcaccccgacccgcaaggcgagcatccctgaaggcgtctggaccaaatgcgatagctgcggtcaggttttgtatcgtgcggagctggagcgtaacctggaagtgtgcccgaaatgcgaccatcacatgcgtatgaccgctcgtaatcgtctgcatagcctgctggatgagggcagcctggtcgagctgggtagcgaactggaaccgaaagatgttctgaaattccgtgattccaagaagtataaggatcgtttggcatctgcacaaaaagaaaccggtgagaaggacgcactggttgttatgaaaggcaccctgtatggtatgccggttgttgctgcggcgttcgagtttgcgtttatgggtggcagcatgggttccgtggtgggcgcacgctttgtgcgtgccgtggagcaggcgctggaggataactgtcctctgatttgtttcagcgcgagcggtggtgcgcgtatgcaagaggccctgatgagcctgatgcagatggcaaaaacctcggcagccctggcgaagatgcaagaacgcggcctgccgtacatttccgtcctgaccgaccctacgatgggcggtgtcagcgccagctttgcgatgctgggtgatttgaacatcgcagagccgaaggctctgattggttttgctggtccgcgtgttattgaacagacggttcgcgaaaagttgccgcctggtttccagcgcagcgagttcctgattgagaaaggtgccatcgacatgatcgttcgccgtccagaaatgcgtctgaaactggcgagcattctggcgaaattgatgaatctgccggctccgaatcctgaagcaccgcgtgagggtgtcgtggttccgccggtcccggaccaagagccggaggcataatagcacgtggagttaaccacgcggcttgccaacggggtctgaatcgctttttttgtatataatgcgtgtgaaatttcataccacaggcgaaggaggaaaaaccatggacattcgtaagatcaagaaactgattgaactggttgaagaaagcggcatcagcgagctggagatcagcgaaggtgaagagagcgtccgtatttcccgtgcggcaccggcagcgagctttccggttatgcagcaagcatacgccgctccgatgatgcaacagccggcacagagcaacgccgctgcaccggcgaccgttccaagcatggaggcaccggcagcggccgagatttcgggtcatatcgtgcgtagcccgatggtgggcaccttctatcgcacgccgtcgccggacgcaaaagccttcatcgaagtcggccagaaggtcaatgtcggcgacacgctgtgtatcgttgaggcaatgaaaatgatgaaccagattgaagcggataagagcggtactgttaaagcgatcctggtggaatccggccagcctgttgagttcgatgaaccgctggttgtgatcgagtaacgaggcgaacatgttggacaagatcgtgattgcaaaccgcggtgaaatcgcgctgcgtatcttgcgcgcgtgtaaagagctgggcattaagactgttgccgtgcattccagcgcagaccgcgacctgaagcatgttctgctggccgacgaaacggtttgcatcggtccggcaccgagcgtgaaaagctatctgaacatcccggccatcatctctgcggcagagatcaccggtgcagtggcgattcatccgggctacggtttcctgagcgagaacgctaactttgctgaacaagtggagcgtagcggtttcatcttcattggccctaaggcggagacgattcgcctgatgggcgacaaagtgagcgccattgcagcgatgaaaaaggccggtgtgccgtgtgttccgggcagcgatggtccgctgggtgacgatatggacaagaaccgtgccatcgctaaacgtattggctacccggtcattatcaaagcctctggtggtggcggtggccgtggtatgcgtgtcgtccgtggtgatgcggaactggcgcaaagcatcagcatgacccgtgcggaagccaaagcggcgttctctaacgatatggtgtatatggagaagtatctggagaatccgcgccacgttgaaatccaagttctggcggatggtcagggcaatgcgatctacttggcagaacgtgattgctccatgcaacgccgtcatcagaaggtggtggaagaggcaccggctccgggtattacgccggaactgcgtcgctacatcggtgagcgctgtgcgaaagcgtgtgtggacattggttaccgtggtgcgggtacgtttgagttcctgttcgaaaatggtgagttttacttcattgaaatgaatacccgcatccaggttgagcacccggtgaccgagatgattactggcgttgatctgatcaaagagcaactgcgcattgcggctggtcagccgctgtcgatcaagcaagaagaggtgcacgttcgtggtcacgcggtcgagtgccgtatcaatgcggaggacccgaatacctttctgccgagccctggtaagatcacgcgttttcacgcgccaggtggttttggcgttcgttgggagtctcacatctacgccggttacaccgtgccgccgtactatgacagcatgattggtaaactgatctgctatggcgaaaatcgtgatgtcgcgatcgcccgcatgaaaaacgcgctgcaagagctgatcattgatggcattaagaccaatgtggatttgcagatccgcattatgaacgacgagaatttccagcacggcggtacgaacattcactacctggaaaagaaactgggcctgcaagagaaataatagggtaccctagcataaccccttggggcctctaaacgggtcttgaggggttttttgaatcccccgggatgtctatcttaaggtagccaaagtttaaatcatacctgacc

SEQ ID NO: 139 - DNA, 1401 bp, Escherichia coli
atgccacattcctacgattacgatgccatagtaataggttccggccccggcggcgaaggcgctgcaatgggcctggttaagcaaggtgcgcgcgtcgcagttatcgagcgttatcaaaatgttggcggcggttgcacccactggggcaccatcccgtcgaaagctctccgtcacgccgtcagccgcattatagaattcaatcaaaacccactttacagcgaccattcccgactgctccgctcttcttttgccgatatccttaaccatgccgataacgtgattaatcaacaaacgcgcatgcgtcagggattttacgaacgtaatcactgtgaaatattgcagggaaacgctcgctttgttgacgagcatacgttggcgctggattgcccggacggcagcgttgaaacactaaccgctgaaaaatttgttattgcctgcggctctcgtccatatcatccaacagatgttgatttcacccatccacgcatttacgacagcgactcaattctcagcatgcaccacgaaccgcgccatgtacttatctatggtgctggagtgatcggctgtgaatatgcgtcgatcttccgcggtatggatgtaaaagtggatctgatcaacacccgcgatcgcctgctggcatttctcgatcaagagatgtcagattctctctcctatcacttctggaacagtggcgtagtgattcgtcacaacgaagagtacgagaagatcgaaggctgtgacgatggtgtgatcatgcatctgaagtcgggtaaaaaactgaaagctgactgcctgctctatgccaacggtcgcaccggtaataccgattcgctggcgttacagaacattgggctagaaactgacagccgcggacagctgaaggtcaacagcatgtatcagaccgcacagccacacgtttacgcggtgggcgacgtgattggttatccgagcctggcgtcggcggcctatgaccaggggcgcattgccgcgcaggcgctggtaaaaggcgaagccaccgcacatctgattgaagatatccctaccggtatttacaccatcccggaaatcagctctgtgggcaaaaccgaacagcagctgaccgcaatgaaagtgccatatgaagtgggccgcgcccagtttaaacatctggcacgcgcacaaatcgtcggcatgaacgtgggcacgctgaaaattttgttccatcgggaaacaaaagagattctgggtattcactgctttggcgagcgcgctgccgaaattattcatatcggtcaggcgattatggaacagaaaggtggcggcaacactattgagtacttcgtcaacaccacctttaactacccgacgatggcggaagcctatcgggtagctgcgttaaacggtttaaaccgcctgttttaa

SEQ ID NO: 140 - DNA, 8995 bp, Artificial Sequence; identical to SEQ ID NO: 134
  Description of Artificial Sequence: Synthetic polynucleotide

SEQ ID NO: 141 - protein, 415 aa, Escherichia coli
MALNIPFRNAYYRFASSYSFLFFISWSLWWSLYAIWLKGHLGLTGTELGTLYSVNQFTSILFMMFYGIVQDKLGLKKPLIWCMSFILVLTGPFMIYVYEPLLQSNFSVGLILGALFFGLGYLAGCGLLDSFTEKMARNFHFEYGTARAWGSFGYAIGAFFAGIFFSISPHINFWLVSLFGAVFMMINMRFKDKDHQCIAADAGGVKKEDFIAVFKDRNFWVFVIFIVGTWSFYNIFDQQLFPVFYAGLFESHDVGTRLYGYLNSFQVVLEALCMAIIPFFVNRVGPKNALLIGVVIMALRILSCALFVNPWIISLVKLLHAIEVPLCVISVFKYSVANFDKRLSSTIFLIGFQIASSLGIVLLSTPTGILFDHAGYQTVFFAISGIVCLMLLFGIFFLSKKREQIVMETPVPSAI

SEQ ID NO: 142 - protein, 307 aa, Escherichia coli
MSAKVWVLGDAVVDLLPESDGRLLPCPGGAPANVAVGIARLGGTSGFIGRVGDDPFGALMQRTLLTEGVDITYLKQDEWHRTSTVLVDLNDQGERSFTFMVRPSADLFLETTDLPCWRHGEWLHLCSIALSAEPSRTSAFTAMTAIRHAGGFVSFDPNIREDLWQDEHLLRLCLRQALQLADVVKLSEEEWRLISGKTQNDRDICALAKEYEIAMLLVTKGAEGVVVCYRGQVHHFAGMSVNCVDSTGAGDAFVAGLLTGLSSTGLSTDEREMRRIIDLAQRCGALAVTAKGAMTALPCRQELESEK

SEQ ID NO: 143 - protein, 477 aa, Escherichia coli
MTQSRLHAAQNALAKLHERRGNTFYPHFHLAPPAGWMNDPNGLIWFNDRYHAFYQHHPMSEHWGPMHWGHATSDDMIHWQHEPIALAPGDENDKDGCFSGSAVDDNGVLSLIYTGHVWLDGAGNDDAIREVQCLATSRDGIHFEKQGVILTPPEGIMHFRDPKVWREADTWWMVVGAKDPGNTGQILLYRGSSLREWTFDRVLAHADAGESYMWECPDFFSLGDQHYLMFSPQGMNAEGYSYRNRFQSGVIPGMWSPGRLFAQSGHFTELDNGHDFYAPQSFVAKDGRRIVIGWMDMWESPMPSKREGWAGCMTLARELSESNGKLLQRPVHEAESLRQQHQSISPRTISNKYVLQENAQAVEIQLQWALKNSDAEHYGLQLGAGMRLYIDNQSERLVLWRYYPHENLDGYRSIPLPQGDMLALRIFIDTSSVEVFINDGEAVMSSRIYPQPEERELSLYASHGVAVLQHGALWQLG

SEQ ID NO: 144 - DNA, 3847 bp, Artificial Sequence
  Description of Artificial Sequence: Synthetic polynucleotide
tcacctcctaactacttaaaattgctatcattcgttattgttatctagttgtgcaaaacattgacatccctatcagtgatagatataatgagcacatgcccaccggcagctgccggtgggccgtattttggatgataacaggaggcaaaaccatggccctgaacatcccattccgcaacgcatactaccgcttcgcaagcagctacagcttcctgttcttcatttcctggagcttgtggtggtcgctgtatgctatctggctgaaaggtcatctgggcttgacgggtacggaactgggtaccctgtattccgttaatcaatttacgtccatcctgtttatgatgttttacggcatcgtgcaggataagctgggcctgaagaaaccgctgatctggtgtatgagcttcatcctggttctgaccggtccgtttatgatttacgtgtacgaaccgctgctgcagtccaactttagcgtgggcctgatcctgggtgcgttgtttttcggcttgggttacctggccggttgtggtctgctggatagctttacggaaaagatggcgcgtaactttcactttgaatatggtaccgcgcgtgcgtggggttcgttcggctacgctatcggcgcgttcttcgccggcattttcttcagcattagcccgcacatcaatttctggctggttagcctgttcggtgcggtctttatgatgatcaacatgcgttttaaggacaaggatcaccagtgtattgcagcggatgctggtggtgttaagaaagaggactttattgcagttttcaaagatcgcaacttctgggtgttcgtgatcttcattgtcggtacctggtccttttacaatatcttcgatcagcaactgtttccggttttctatgcgggcctgttcgaaagccacgatgttggcacgcgtctgtacggttatctgaatagctttcaagtcgtcctggaagctctgtgtatggcgatcattccgttctttgttaaccgtgtaggcccgaaaaatgcgttgctgattggcgttgtgattatggcactgcgtatcctgagctgcgcactgtttgtgaatccgtggatcattagcctggtgaaactgctgcacgctattgaagtcccgctgtgtgtcatctctgttttcaagtattccgtcgcgaacttcgacaagcgtttgtccagcaccatcttcctgatcggtttccaaattgcaagcagcctgggtattgttctgttgagcacgccgactggtattttgtttgatcacgctggttatcagactgtgttctttgcgatctcgggtatcgtttgcttgatgctgctgttcggtatctttttcctgtctaagaaacgcgagcaaattgttatggaaaccccggttcctagcgcgatctaaggaggtaatacacatgtcagcgaaagtatgggtcctgggcgacgcagtagtagatctgttgccggaaagcgacggtcgtctgctgccgtgtccgggtggtgcaccggctaatgttgcggtgggcatcgcgcgtctgggtggtacctcgggttttatcggtcgcgtgggtgacgaccctttcggtgcgctgatgcagcgcactttgctgaccgagggtgtggatatcacgtatctgaagcaggatgagtggcatcgtacctctaccgtcctggtggacctgaatgaccagggtgaacgtagcttcaccttcatggtgcgcccgagcgccgatttgtttctggaaacgaccgatctgccgtgttggcgtcacggcgagtggctgcacttgtgtagcattgcactgtctgcggaaccgtcgcgcacgagcgccttcaccgcgatgacggcaatccgccatgcaggtggctttgtctccttcgacccgaacattcgtgaggatctgtggcaggacgagcacctgttgcgcctgtgcctgcgtcaagcactgcagttggccgacgttgtaaaactgtccgaagaagagtggcgtctgatctctggtaaaacgcagaatgaccgcgatatttgtgcgctggctaaagagtatgagatcgccatgttgctggtgacgaagggtgccgaaggtgttgttgtgtgctatcgtggtcaggtgcaccattttgcaggcatgtccgtgaattgcgtggattctacgggcgcaggcgatgcgttcgtcgcgggtctgttgaccggtctgagcagcaccggcctgtcgaccgatgaacgtgaaatgcgtcgtatcattgacctggcgcagcgttgcggtgccttggcggttaccgcaaagggtgccatgaccgcattgccgtgccgtcaggagctggaaagcgagaaataaggaggtaatactcatgactcaatcccgcctgcacgcagcacaaaacgcactggcaaagctgcatgagcgtcgtggtaacaccttctacccacacttccacctggcgccacctgcgggttggatgaacgatccgaacggcctgatttggttcaacgaccgttaccatgcgttctatcaacaccaccctatgtccgagcattggggtccgatgcattggggccacgctaccagcgatgacatgatccattggcagcacgagccgattgccctggcaccgggtgatgagaacgacaaggatggttgcttcagcggttctgctgtcgatgataacggtgtcctgtctctgatctacaccggtcatgtctggctggatggcgctggcaatgacgacgcaatccgtgaagttcaatgcctggcgacctcgcgtgacggcattcacttcgagaaacagggcgtcattttgacgccgcctgagggtatcatgcactttcgcgacccaaaagtttggcgtgaagcggacacgtggtggatggtcgtcggcgcgaaagacccgggtaacacgggtcagattctgctgtatcgtggcagcagcctgcgtgagtggaccttcgaccgcgtcctggcccatgctgatgcgggcgagagctatatgtgggaatgcccagacttcttttctctgggcgaccaacattatctgatgttcagcccgcaaggcatgaatgcggagggctacagctaccgtaaccgctttcagagcggcgttatcccgggtatgtggagcccaggtcgcctgtttgctcagtccggtcattttaccgagctggacaatggtcacgatttctatgcaccgcaatcgttcgtggcgaaagatggccgtcgcatcgttattggttggatggatatgtgggaaagcccgatgccgagcaagcgtgagggttgggcgggttgcatgaccctggcccgtgagctgagcgagagcaatggcaaattgctgcaacgcccggtgcacgaggcagaaagcctgcgccagcaacaccaaagcatcagccctcgtaccattagcaacaaatacgttctgcaggaaaatgcgcaggccgttgagattcaactgcaatgggccctgaaaaacagcgacgcggagcattacggcctgcagctgggtgcgggcatgcgtttgtacattgataatcaaagcgagcgtttggttttgtggcgctactacccgcatgagaacctggacggctaccgtagcatcccgctgccgcagggtgacatgctggcgctgcgtattttcattgatactagcagcgtcgaggtattcatcaatgacggcgaagccgtgatgtctagccgtatttacccgcagccggaggaacgcgagctgagcttgtatgccagccacggtgtcgcggtgctgcaacacggtgcactgtggcaactgggttaagcttcagtagcgctgtctggcaacataaacggccccttctgggcaatgccgatcagttaagga

SEQ ID NO: 145 - DNA, 1242 bp, Escherichia coli
gtgtctaagcgtcgtgtagttgtgaccggactgggcatgttgtctcctgtcggcaataccgtagagtctacctggaaagctctgcttgccggtcagagtggcatcagcctaatcgaccatttcgatactagcgcctatgcaacgaaatttgctggcttagtaaaggattttaactgtgaggacattatctcgcgcaaagaacagcgcaagatggatgccttcattcaatatggaattgtcgctggcgttcaggccatgcaggattctggccttgaaataacggaagagaacgcaacccgcattggtgccgcaattggctccgggattggcggcctcggactgatcgaagaaaaccacacatctctgatgaacggtggtccacgtaagatcagcccattcttcgttccgtcaacgattgtgaacatggtggcaggtcatctgactatcatgtatggcctgcgtggcccgagcatctctatcgcgactgcctgtacttccggcgtgcacaacattggccatgctgcgcgtattatcgcgtatggcgatgctgacgtgatggttgcaggtggcgcagagaaagccagtacgccgctgggcgttggtggttttggcgcggcacgtgcattatctacccgcaatgataacccgcaagcggcgagccgcccgtgggataaagagcgtgatggtttcgtactgggcgatggtgccggtatgctggtacttgaagagtacgaacacgcgaaaaaacgcggtgcgaaaatttacgctgaactcgtcggctttggtatgagcagcgatgcttatcatatgacgtcaccgccagaaaatggcgcaggcgcagctctggcgatggcaaatgctctgcgtgatgcaggcattgaagcgagtcagattggctacgttaacgcgcacggtacttctacgccggctggcgataaagctgaagcgcaggcggtgaaaaccatcttcggtgaagctgcaagccgtgtgttggtaagctccacgaaatctatgaccggtcacctgttaggtgcggcgggtgcagtagaatctatctactccatcctggcgctgcgcgatcaggctgttccgccaaccatcaacctggataacccggatgaaggttgcgatctggatttcgtaccgcacgaagcgcgtcaggttagcggaatggaatacactctgtgtaactccttcggcttcggtggcactaatggttctttgatctttaaaaagatctaa

SEQ ID NO: 146 - DNA, 1221 bp, Artificial Sequence
  Description of Artificial Sequence: Synthetic polynucleotide
atgaaacgtgcagtgattactggcctgggcattgtttccagcatcggtaataaccagcaggaagtcctggcatctctgcgtgaaggacgttcagggatcactttctctcaggagctgaaggattccggcatgcgtagccacgtctggggcaacgtaaaactggataccactggcctcattgaccgcaaagttgtgcgctttatgagcgacgcatccatttatgcattcctttctatggagcaggcaatcgctgatgcgggcctctctccggaagcttaccagaataacccgcgcgttggcctgattgcaggttccggcggcggctccccgcgtttccaggtgttcggcgctgacgcaatgcgcggcccgcgcggcctgaaagcggttggcccgtatgtggtcaccaaagcgatggcatccggcgtttctgcctgcctcgccaccccgtttaaaattcatggcgttaactactccatcagctccgcgtgtgcgacttccgcacactgtatcggtaacgcagtagagcagatccaactgggcaaacaggacatcgtgtttgctggcggcggcgaagagctgtgctgggaaatggcttgcgaattcgacgcaatgggtgcgctgtctactaaatacaacgacaccccggaaaaagcctcccgtacttacgacgctcaccgtgacggtttcgttatcgctggcggcggcggtatggtagtggttgaagagctggaacacgcgctggcgcgtggtgctcacatctatgctgaaatcgttggctacggcgcaacctctgatggtgcagacatggttgctccgtctggcgaaggcgcagtacgctgcatgaagatggcgatgcatggcgttgataccccaatcgattacctgaactcccacggtacttcgactccggttggcgacgtgaaagagctggcagctatccgtgaagtgttcggcgataagagcccggcgatttctgcaaccaaagtcatgaccggtcactctctgggcgctgctggcgtacaggaagctatctactctctgctgatgctggaacacggctttatcgccccgagcatcaacattgaagagctggacgagcaggctgcgggtctgaacatcgtgaccgaaacgaccgatcgcgaactgaccaccgttatgtctaacagcttcggcttcggcggcaccaacgccacgctggtaatgcgcaagctgaaagattaa

SEQ ID NO: 147 - DNA, 2503 bp, Artificial Sequence
  Description of Artificial Sequence: Synthetic polynucleotide
cttacaggcggtggctcgatcttagcgatgtgtgtaaggctgcgcaaatttctctattaaatggctgatcggacttgttcggcgtacaagtgtacgctattgtgcattcgaaacttactctatgtgcgacttacagaggtattgaatgaaacgtgcagtgattactggcctgggcattgtttccagcatcggtaataaccagcaggaagtcctggcatctctgcgtgaaggacgttcagggatcactttctctcaggagctgaaggattccggcatgcgtagccacgtctggggcaacgtaaaactggataccactggcctcattgaccgcaaagttgtgcgctttatgagcgacgcatccatttatgcattcctttctatggagcaggcaatcgctgatgcgggcctctctccggaagcttaccagaataacccgcgcgttggcctgattgcaggttccggcggcggctccccgcgtttccaggtgttcggcgctgacgcaatgcgcggcccgcgcggcctgaaagcggttggcccgtatgtggtcaccaaagcgatggcatccggcgtttctgcctgcctcgccaccccgtttaaaattcatggcgttaactactccatcagctccgcgtgtgcgacttccgcacactgtatcggtaacgcagtagagcagatccaactgggcaaacaggacatcgtgtttgctggcggcggcgaagagctgtgctgggaaatggcttgcgaattcgacgcaatgggtgcgctgtctactaaatacaacgacaccccggaaaaagcctcccgtacttacgacgctcaccgtgacggtttcgttatcgctggcggcggcggtatggtagtggttgaagagctggaacacgcgctggcgcgtggtgctcacatctatgctgaaatcgttggctacggcgcaacctctgatggtgcagacatggttgctccgtctggcgaaggcgcagtacgctgcatgaagatggcgatgcatggcgttgataccccaatcgattacctgaactcccacggtacttcgactccggttggcgacgtgaaagagctggcagctatccgtgaagtgttcggcgataagagcccggcgatttctgcaaccaaagtcatgaccggtcactctctgggcgctgctggcgtacaggaagctatctactctctgctgatgctggaacacggctttatcgccccgagcatcaacattgaagagctggacgagcaggctgcgggtctgaacatcgtgaccgaaacgaccgatcgcgaactgaccaccgttatgtctaacagcttcggcttcggcggcaccaacgccacgctggtaatgcgcaagctgaaagattaattcgcagtaggtcggagtagacgcgccagcgtcgcatccgacgttacgcgccaatgcggcctccggcactaacgcatttaaataggcctggcgctagatcagtttaaacataacttcgtatagcatacattatacgaagttattgttgacaattaatcatcggcatagtatatcggcatagtataatacgacaaggtgaggaactaaaccatggccaagcctttgtctcaagaagaatccaccctcattgaaagagcaacggctacaatcaacagcatccccatctctgaagactacagcgtcgccagcgcagctctctctagcgacggccgcatcttcactggtgtcaatgtatatcattttactgggggaccttgtgcagaactcgtggtgctgggcactgctgctgctgcggcagctggcaacctgacttgtatcgtcgcgatcggaaatgagaacaggggcatcttgagcccctgcggacggtgccgacaggtgcttctcgatctgcatcctgggatcaaagccatagtgaaggacagtgatggacagccgacggcagttgggattcgtgaattgctgccctctggttatgtgtgggagggctaaataacttcgtatagcatacattatacgaagttatagatctgtcgacgggaacctgatggttccctttttcacatcattgacaatcgccgccagttccaggcaaacttcccgctttgtcgatttccttctgaaaagacgtacgcgttaaatcctgccaacgcaccgtaaccctgaaaccagagagatgagacggggatactcctcgccttgcgctgcattctggagtaatgcatgactgctgtaagccaaaccgaaacacgatcttctgccaatttttcgctcttccgcatcgcttttgcggtttttctcacctacatgaccgtagggttgccgttgccggttatcccgctgtttgttcatcatgaactgggctatggcaataccatggtcggcattgccgtcgggattcagtttctggctacggtgctgacgcgtggttacgccgggcgactggccgatcaatatggtgcaaaacgttcggcgcttcagggaatgttagcttgtggtctggctggcggcgcgttgctg

SEQ ID NO: 148 - DNA, 3651 bp, Artificial Sequence
  Description of Artificial Sequence: Synthetic polynucleotide
atgagcaaagaaggtaatgcggccaaaggccgcctggagggtaaagtggccctgatcaccggtgcagctggcaacctgggtaatgaaattagccgcgcgtttgcccgtgagggtgcgttcgtggttatgaccggccgcacggaagaacgtatctctgcggcccgcgaacagctgattgcggataccggtgtcgccccggaacgtatcgacacggcggtgctggatggcggtaacccggactctattcgtgcagctatggccaaactgcgcaaagaatatggccgtattgatatcctgattaacaatgcaggttcagcaggtccgaaacagccgctgcataatgttccgctgtcgccgcaagaaatggaagcatgcggtgataccgaaacggtgcgcgacgcgatgctgaacatcctgggcgtgacctggaatatggctcgtattgttgcgccgatgatgccggtgggcggtgcaatggttaatatcagcaccatttttagccacacgcgctattacggccgtaccgcgtatgtcgtgccgaaagcggccctgaacgcactgagcaatcagctggcttctgaactgggcccgcgtggtattcgcgttaacaccgtctttccgggtccgatcgaaagtgatcgtattcgcacggtgttcgcagctatggatgaagttcagtcccaaccgaaagacaccacggcgaattactttaccggtcgtatggcactgacgcgtagcgtcaacggcaaagtggatggtaaaccgctgccgaatccgaaagacatcgcgggtacctgtctgttcctggccagtgaagaagcggccggcattgccggtgaagaagttgatgtcacccatggcctgtccgcaaaccgcacgtctgctagtacctatatgacgcgcccgtctatgcgtagtctggatggcgcgggtctgaacatcttcatcgtttcaggtgaaaactgggatgacgccctggtcgcagctcacaccctgatcggctcgggtgcaaaagtgcgcctgggcctggcacgtaacgctgatgttgcacaggctaatgcgcgtctgaaagcgcaaggcattggtgaagaactgaccgttacgcgttttaatcgcgccgaaccggacgcaatggaagatgctctggcggccttcagtggcgacgttgatggtgcgatcaccggcgccattatcctgccggtcaaaccgagcggtcattttacgggctctctgctggcagctgatgacgataccgtgacgaaattcatggataccgaactggtcggtgccattgcagtgtcccgttcactggcacgttactggcacggtcgtgaagatttgcagagcccgccgcgttgcgtttttatgaccaacccgggtgacccgctgggcaattccttcgcgtcagtgctgtcggccggtatcacgcagctgatccgtatttggcgcgatgaagaacgcgttcaagcaggcaacggtagtaccgaacatgcggtctggtccaatcagattgtgcgccacaccaacacggaagatgaaaatacccgttttgcaagcggccatgctacgcgcgtgctgttccgtgaacaacacatcgccgaaattgatctgaaactgccggcaaacatcagtgaagaaaccggttcccgcaaagcaatggtgggctttgctgaaaatattaccggtctgcatctgggcaaagttgcattcatcacgggcggtagtgctggtattggcggtcaggtggcacgtctgctggctctggcaggtgccaaagtgatgatggttgcacgtcgcgaatccgaactggtcgcggcacgtgatcgcatcgtgggtgaactgcaagacattggctttgcgggtgttgaacgtcgcgtcaaatatatggcggacattgatgtcagtgattttgcctccctggacaaagcggtggatgccaccctggaagaattcggccgtatcgactacctgattaacaatgcgggcgttgcaggtgctgaagacatggtcatcgatatggaaccggaagcctggcgcttcaccctggatgcaaacctgattagcaattatcatctgatgcagcgtgttgtcccgctgatgaaagaacaaggctctggttatgtcctgaacgtgagctcttactttggcggtgaaaaattcctggcggttgcctatccgaatcgcgccgattacggtctgagcaaagcgggccagcgtgccatggtggaagcattttctccgttcctgggcccggaagttcaatgcaacgcaattgctccgggtccggtcgacggtgatcgtctgtctggtaccggcggtaaaccgggcctgtttcagcgtcgcgcgaaactgatcctggaaaacaaacgcctgaatgctgtgtatagtgcggttatccatgccattcgtgaaggcggtgatgcagctaaaattctgacccgtctgagtcgcaattcgaccagcacgctgtcccacgatgcagaagcaccggaagaactgcgtaaactggcactggattttgctagccagggcgacggtctgtgtacctgggatcaatacctgctgacggacgcaatggctcagcgtctgctggtgcgtctgcaactgggcggttttctgctgggttcaaacgaatgggcctcgctgagttcctcagaacagacctggctgaaactgtcaccgccggacgataaaccgttcctgccggcggcccaagttgataaagtcgcgaatggcgtcggtaaaggcgtgatttcgcagctgcatctgggtgcaatgccgaccgaagccgaagttgcgcaagccacggtctttttcctggcagatcgcgctgtgtcaggtgaaacctttatgccgtcgggcggtctgcgtgttgaacgctcaaacaccgaacgcgaaatgttcggctcgccgaaacaggaacgtatcgataaaatgaaaggtaaaaccgtctggattatcggcgaacacctgagtgactatgtggcagctacgatcgaagaactggtgtccggttgcggcgttgcgaaagtggttctgattgccaaagataaaagcggtgaaaaagcggttcgtgaccagctgccgaatgacctgtctaaagatgcactggaagtgctgatcgctggtgatggcctggaagaagcgatggacgaagccctgggccattggggtaaaccgaccacggtgctgtcaatgccgggcgaaccgctgccggatcacctgtttgaaggcggtaacccgctgtcgaccaaagacttcgcacatatggtggaagctaatattacccgtcactatcgcgttacgcgtaaagcgtccctgtacgatggttgtcaggtcgtgctggttagcccggatgtcccgtacggttctgacggtccgggtgttgcactggctaactttgtcaaaacctctctgcatgcgttcaccgccacggtggcagttgaaaatgaacgcctggttcacgatgtcccggtgaaccagatcaatctgacgcgtcgcgtgtcgagcgaagaaccgcgtgacgcagatgaacatgctgaagaactgcgtcgctttacccgtgcagtgctgctggttggtgcaccgctgccggacgcacaggattcacgttatcgctcgaaaatttaccgcggcaccagcatgacggtg

SEQ ID NO: 149 - DNA, 2568 bp, Artificial Sequence; identical to SEQ ID NO: 125
  Description of Artificial Sequence: Synthetic polynucleotide

SEQ ID NO: 150 - DNA, 2172 bp, Artificial Sequence; identical to SEQ ID NO: 124
  Description of Artificial Sequence: Synthetic polynucleotide

SEQ ID NO: 151 - DNA, 657 bp, Escherichia coli
gtgaaagagattattgatggattccttaaattccagcgcgaggcatttccgaagcgggaagccttgtttaaacagctggcgacacagcaaagcccgcgcacactttttatctcctgctccgacagccgtctggtccctgagctggtgacgcaacgtgagcctggcgatctgttcgttattcgcaacgcgggcaatatcgtcccttcctacgggccggaacccggtggcgtttctgcttcggtggagtatgccgtcgctgcgcttcgggtatctgacattgtgatttgtggtcattccaactgtggcgcgatgaccgccattgccagctgtcagtgcatggaccatatgcctgccgtctcccactggctgcgttatgccgattcagcccgcgtcgttaatgaggcgcgcccgcattccgatttaccgtcaaaagctgcggcgatggtacgtgaaaacgtcattgctcagttggctaatttgcaaactcatccatcggtgcgcctggcgctcgaagaggggcggatcgccctgcacggctgggtctacgacattgaaagcggcagcatcgcagcttttgacggcgcaacccgccagtttgtgccactggccgctaatcctcgcgtttgtgccataccgctacgccaaccgaccgcagcg

SEQ ID NO: 152 - DNA, 468 bp, Escherichia coli
atgattcagtcacaaattaaccgcaatattcgtcttgatcttgccgatgccattttgctcagcaaagctaaaaaagatctctcatttgccgagattgccgacggcaccggtctggcagaagcctttgtaaccgcggctttgctgggtcagcaggcgcttcctgccgacgccgcccgcctggtcggggcgaagctggatctcgacgaagactccattctactgttgcagatgattccactgcgtggctgcattgatgaccgtattccaactgacccaacgatgtatcgtttctatgaaatgttgcaggtgtacggtacaaccctgaaagcgttggttcatgagaaatttggcgatggcattattagcgcgattaacttcaaactcgacgttaagaaagtggcggacccggaaggtggcgaacgtgcggtcatcaccttagatggtaaatatctgccgaccaaaccgttc

SEQ ID NO: 153 - DNA, 1230 bp, Escherichia coli
atggcaaaggtatcgctggagaaagacaagattaagtttctgctggtagaaggcgtgcaccaaaaggcgctggaaagccttcgtgcagctggttacaccaacatcgaatttcacaaaggcgcgctggatgatgaacaattaaaagaatccatccgcgatgcccacttcatcggcctgcgatcccgtacccatctgactgaagacgtgatcaacgccgcagaaaaactggtcgctattggctgtttctgtatcggaacaaaccaggttgatctggatgcggcggcaaagcgcgggatcccggtatttaacgcaccgttctcaaatacgcgctctgttgcggagctggtgattggcgaactgctgctgctattgcgcggcgtgccggaagccaatgctaaagcgcaccgtggcgtgtggaacaaactggcggcgggttcttttgaagcgcgcggcaaaaagctgggtatcatcggctacggtcatattggtacgcaattgggcattctggctgaatcgctgggaatgtatgtttacttttatgatattgaaaataaactgccgctgggcaacgccactcaggtacagcatctttctgacctgctgaatatgagcgatgtggtgagtctgcatgtaccagagaatccgtccaccaaaaatatgatgggcgcgaaagaaatttcactaatgaagcccggctcgctgctgattaatgcttcgcgcggtactgtggtggatattccggcgctgtgtgatgcgctggcgagcaaacatctggcgggggcggcaatcgacgtattcccgacggaaccggcgaccaatagcgatccatttacctctccgctgtgtgaattcgacaacgtccttctgacgccacacattggcggttcgactcaggaagcgcaggagaatatcggcctggaagttgcgggtaaattgatcaagtattctgacaatggctcaacgctctctgcggtgaacttcccggaagtctcgctgccactgcacggtgggcgtcgtctgatgcacatccacgaaaaccgtccgggcgtgctaactgcgctgaacaaaatcttcgccgagcagggcgtcaacatcgccgcgcaatatctgcaaacttccgcccagatgggttatgtggttattgatattgaagccgacgaagacgttgccgaaaaagcgctgcaggcaatgaaagctattccgggtaccattcgcgcccgtctgctgtac

SEQ ID NO: 154 - DNA, 1530 bp, Escherichia coli
atggcaattggcataccaagagaacggttaaccaatgaaacccgtgttgcagcaacgccaaaaacagtggaacagctgctgaaactgggttttaccgtcgcggtagagagcggcgcgggtcaactggcaagttttgacgataaagcgtttgtgcaagcgggcgctgaaattgtagaagggaatagcgtctggcagtcagagatcattctgaaggtcaatgcgccgttagatgatgaaattgcgttactgaatcctgggacaacgctggtgagttttatctggcctgcgcagaatccggaattaatgcaaaaacttgcggaacgtaacgtgaccgtgatggcgatggactctgtgccgcgtatctcacgcgcacaatcgctggacgcactaagctcgatggcgaacatcgccggttatcgcgccattgttgaagcggcacatgaatttgggcgcttctttaccgggcaaattactgcggccgggaaagtgccaccggcaaaagtgatggtgattggtgcgggtgttgcaggtctggccgccattggcgcagcaaacagtctcggcgcgattgtgcgtgcattcgacacccgcccggaagtgaaagaacaagttcaaagtatgggcgcggaattcctcgagctggattttaaagaggaagctggcagcggcgatggctatgccaaagtgatgtcggacgcgttcatcaaagcggaaatggaactctttgccgcccaggcaaaagaggtcgatatcattgtcaccaccgcgcttattccaggcaaaccagcgccgaagctaattacccgtgaaatggttgactccatgaaggcgggcagtgtgattgtcgacctggcagcccaaaacggcggcaactgtgaatacaccgtgccgggtgaaatcttcactacggaaaatggtgtcaaagtgattggttataccgatcttccgggccgtctgccgacgcaatcctcacagctttacggcacaaacctcgttaatctgctgaaactgttgtgcaaagagaaagacggcaatatcactgttgattttgatgatgtggtgattcgcggcgtgaccgtgatccgtgcgggcgaaattacctggccggcaccgccgattcaggtatcagctcagccgcaggcggcacaaaaagcggcaccggaagtgaaaactgaggaaaaatgtacctgctcaccgtggcgtaaatacgcgttgatggcgctggcaatcattctttttggctggatggcaagcgttgcgccgaaagaattccttgggcacttcaccgttttcgcgctggcctgcgttgtcggttattacgtggtgtggaatgtatcgcacgcgctgcatacaccgttgatgtcggtcaccaacgcgatttcagggattattgttgtcggagcactgttgcagattggccagggcggctgggttagcttccttagttttatcgcggtgcttatagccagcattaatattttcggtggcttcaccgtgactcagcgcatgctgaaaatgttccgcaaaaat

SEQ ID NO: 155 - DNA, 1386 bp, Escherichia coli
atgtctggaggattagttacagctgcatacattgttgccgcgatcctgtttatcttcagtctggccggtctttcgaaacatgaaacgtctcgccagggtaacaacttcggtatcgccgggatggcgattgcgttaatcgcaaccatttttggaccggatacgggtaatgttggctggatcttgctggcgatggtcattggtggggcaattggtatccgtctggcgaagaaagttgaaatgaccgaaatgccagaactggtggcgatcctgcatagcttcgtgggtctggcggcagtgctggttggctttaacagctatctgcatcatgacgcgggaatggcaccgattctggtcaatattcacctgacggaagtgttcctcggtatcttcatcggggcggtaacgttcacgggttcggtggtggcgttcggcaaactgtgtggcaagatttcgtctaaaccattgatgctgccaaaccgtcacaaaatgaacctggcggctctggtcgtttccttcctgctgctgattgtatttgttcgcacggacagcgtcggcctgcaagtgctggcattgctgataatgaccgcaattgcgctggtattcggctggcatttagtcgcctccatcggtggtgcagatatgccagtggtggtgtcgatgctgaactcgtactccggctgggcggctgcggctgcgggctttatgctcagcaacgacctgctgattgtgaccggtgcgctggtcggttcttcgggggctatcctttcttacattatgtgtgaggcgatgaaccgttcctttatcagcgttattgcgggtggtttcggcaccgacggctcttctactggcgatgatcaggaagtgggtgagcaccgcgaaatcaccgcagaagagacagcggaactgctgaaaaactcccattcagtgatcattactccggggtacggcatggcagtcgcgcaggcgcaatatcctgtcgctgaaattactgagaaattgcgcgctcgtggtattaatgtgcgtttcggtatccacccggtcgcggggcgtttgcctggacatatgaacgtattgctggctgaagcaaaagtaccgtatgacatcgtgctggaaatggacgagatcaatgatgactttgctgataccgataccgtactggtgattggtgctaacgatacggttaacccggcggcgcaggatgatccgaagagtccgattgctggtatgcctgtgctggaagtgtggaaagcgcagaacgtgattgtctttaaacgttcgatgaacactggctatgctggtgtgcaaaacccgctgttcttcaaggaaaacacccacatgctgtttggtgacgccaaagccagcgtggatgcaatcctgaaagctctg

SEQ ID NO: 156 - DNA, 1401 bp, Escherichia coli
atggccccacattcctacgattacgatgccatagtaataggttccggccccggcggcgaaggcgctgcaatgggcctggttaagcaaggtgcgcgcgtcgcagttatcgagcgttatcaaaatgttggcggcggttgcacccactggggcaccatcccgtcgaaagctctccgtcacgccgtcagccgcattatagaattcaatcaaaacccactttacagcgaccattcccgactgctccgctcttcttttgccgatatccttaaccatgccgataacgtgattaatcaacaaacgcgcatgcgtcagggattttacgaacgtaatcactgtgaaatattgcagggaaacgctcgctttgttgacgagcatacgttggcgctggattgcccggacggcagcgttgaaacactaaccgctgaaaaatttgttattgcctgcggctctcgtccatatcatccaacagatgttgatttcacccatccacgcatttacgacagcgactcaattctcagcatgcaccacgaaccgcgccatgtacttatctatggtgctggagtgatcggctgtgaatatgcgtcgatcttccgcggtatggatgtaaaagtggatctgatcaacacccgcgatcgcctgctggcatttctcgatcaagagatgtcagattctctctcctatcacttctggaacagtggcgtagtgattcgtcacaacgaagagtacgagaagatcgaaggctgtgacgatggtgtgatcatgcatctgaagtcgggtaaaaaactgaaagctgactgcctgctctatgccaacggtcgcaccggtaataccgattcgctggcgttacagaacattgggctagaaactgacagccgcggacagctgaaggtcaacagcatgtatcagaccgcacagccacacgtttacgcggtgggcgacgtgattggttatccgagcctggcgtcggcggcctatgaccaggggcgcattgccgcgcaggcgctggtaaaaggcgaagccaccgcacatctgattgaagatatccctaccggtatttacaccatcccggaaatcagctctgtgggcaaaaccgaacagcagctgaccgcaatgaaagtgccatatgaagtgggccgcgcccagtttaaacatctggcacgcgcacaaatcgtcggcatgaacgtgggcacgctgaaaattttgttccatcgggaaacaaaagagattctgggtattcactgctttggcgagcgcgctgccgaaattattcatatcggtcaggcgattatggaacagaaaggtggcggcaacactattgagtacttcgtcaacaccacctttaactacccgacgatggcggaagcctatcgggtagctgcgttaaacggtttaaaccgcctgttt

SEQ ID NO: 157 - DNA, 1242 bp, Escherichia coli
atgggatctaagcgtcgtgtagttgtgaccggactgggcatgttgtctcctgtcggcaataccgtagagtctacctggaaagctctgcttgccggtcagagtggcatcagcctaatcgaccatttcgatactagcgcctatgcaacgaaatttgctggcttagtaaaggattttaactgtgaggacattatctcgcgcaaagaacagcgcaagatggatgccttcattcaatatggaattgtcgctggcgttcaggccatgcaggattctggccttgaaataacggaagagaacgcaacccgcattggtgccgcaattggctccgggattggcggcctcggactgatcgaagaaaaccacacatctctgatgaacggtggtccacgtaagatcagcccattcttcgttccgtcaacgattgtgaacatggtggcaggtcatctgactatcatgtatggcctgcgtggcccgagcatctctatcgcgactgcctgtacttccggcgtgcacaacattggccatgctgcgcgtattatcgcgtatggcgatgctgacgtgatggttgcaggtggcgcagagaaagccagtacgccgctgggcgttggtggttttggcgcggcacgtgcattatctacccgcaatgataacccgcaagcggcgagccgcccgtgggataaagagcgtgatggtttcgtactgggcgatggtgccggtatgctggtacttgaagagtacgaacacgcgaaaaaacgcggtgcgaaaatttacgctgaactcgtcggctttggtatgagcagcgatgcttatcatatgacgtcaccgccagaaaatggcgcaggcgcagctctggcgatggcaaatgctctgcgtgatgcaggcattgaagcgagtcagattggctacgttaacgcgcacggtacttctacgccggctggcgataaagctgaagcgcaggcggtgaaaaccatcttcggtgaagctgcaagccgtgtgttggtaagctccacgaaatctatgaccggtcacctgttaggtgcggcgggtgcagtagaatctatctactccatcctggcgctgcgcgatcaggctgttccgccaaccatcaacctggataacccggatgaaggttgcgatctggatttcgtaccgcacgaagcgcgtcaggttagcggaatggaatacactctgtgtaactccttcggcttcggtggcactaatggttctttgatctttaaaaagatc

SEQ ID NO: 158 - DNA, 7999 bp, Artificial Sequence; identical to SEQ ID NO: 128
  Description of Artificial Sequence: Synthetic polynucleotide

SEQ ID NO: 159 - protein, 329 aa, Streptomyces sp.
  Streptomyces sp. NphT7
MTDVRFRIIGTGAYVPERIVSNDEVGAPAGVDDDWITRKTGIRQRRWAADDQATSDLATAAGRAALKAAGITPEQLTVIAVATSTPDRPQPPTAAYVQHHLGATGTAAFDVNAVCSGTVFALSSVAGTLVYRGGYALVIGADLYSRILNPADRKTVVLFGDGAGAMVLGPTSTGTGPIVRRVALHTFGGLTDLIRVPAGGSRQPLDTDGLDAGLQYFAMDGREVRRFVTEHLPQLIKGFLHEAGVDAADISHFVPHQANGVMLDEVFGELHLPRATMHRTVETYGNTGAASIPITMDAAVRAGSFRPGELVLLAGFGGGMAASFALIEW

SEQ ID NO: 160 - DNA, 2137 bp, Streptomyces sp.
  Streptomyces sp. NphT7
cctgcaggccgtcgagggcgcctggaaggactacgcggagcaggacggccggtcgctggaggagttcgcggcgttcgtctaccaccagccgttcacgaagatggcctacaaggcgcaccgccacctgctgaacttcaacggctacgacaccgacaaggacgccatcgagggcgccctcggccagacgacggcgtacaacaacgtcatcggcaacagctacaccgcgtcggtgtacctgggcctggccgccctgctcgaccaggcggacgacctgacgggccgttccatcggcttcctgagctacggctcgggcagcgtcgccgagttcttctcgggcaccgtcgtcgccgggtaccgcgagcgtctgcgcaccgaggcgaaccaggaggcgatcgcccggcgcaagagcgtcgactacgccacctaccgcgagctgcacgagtacacgctcccgtccgacggcggcgaccacgccaccccggtgcagaccaccggccccttccggctggccgggatcaacgaccacaagcgcatctacgaggcgcgctagcgacacccctcggcaacggggtgcgccactgttcggcgcaccccgtgccgggctttcgcacagctattcacgaccatttgaggggcgggcagccgcatgaccgacgtccgattccgcattatcggtacgggtgcctacgtaccggaacggatcgtctccaacgatgaagtcggcgcgccggccggggtggacgacgactggatcacccgcaagaccggtatccggcagcgtcgctgggccgccgacgaccaggccacctcggacctggccacggccgcggggcgggcagcgctgaaagcggcgggcatcacgcccgagcagctgaccgtgatcgcggtcgccacctccacgccggaccggccgcagccgcccacggcggcctatgtccagcaccacctcggtgcgaccggcactgcggcgttcgacgtcaacgcggtctgctccggcaccgtgttcgcgctgtcctcggtggcgggcaccctcgtgtaccggggcggttacgcgctggtcatcggcgcggacctgtactcgcgcatcctcaacccggccgaccgcaagacggtcgtgctgttcggggacggcgccggcgcaatggtcctcgggccgacctcgaccggcacgggccccatcgtccggcgcgtcgccctgcacaccttcggcggcctcaccgacctgatccgtgtgcccgcgggcggcagccgccagccgctggacacggatggcctcgacgcgggactgcagtacttcgcgatggacgggcgtgaggtgcgccgcttcgtcacggagcacctgccgcagctgatcaagggcttcctgcacgaggccggggtcgacgccgccgacatcagccacttcgtgccgcatcaggccaacggtgtcatgctcgacgaggtcttcggcgagctgcatctgccgcgggcgaccatgcaccggacggtcgagacctacggcaacacgggagcggcctccatcccgatcaccatggacgcggccgtgcgcgccggttccttccggccgggcgagctggtcctgctggccgggttcggcggcggcatggccgcgagcttcgccctgatcgagtggtagtcgcccgtaccaccacagcggtccggcgccacctgttccctgcgccgggccgccctcggggcctttaggccccacaccgccccagccgacggattcagtcgcggcagtacctcagatgtccgctgcgacggcgtcccggagagcccgggcgagatcgcgggcccccttctgctcgtccccggcccctcccgcgagcaccacccgcggcggacggccgccgtcctccgcgatacgccgggcgaggtcgcaggcgagcacgccggacccggagaagccccccagcaccagcgaccggccgactccgtgcgcggccagggcaggctgcgcgccgtcgacgtcggtgagcagcaccaggagctcctgcggcccggcgtagaggtcggccagccggtcgtagcaggtcgcgggcgcgcccggcggcgggatcagacagatcgtgcccgcccgctcgtgcctcgccgcccgcagcgtgaccagcggaatgtcccgcccagctccgga

SEQ ID NO: 161 - protein, 349 aa, Pseudomonas fluorescens
  phld Pseudomonas fluorescens Pf-5
MSTLCLPHVMFPQHKITQQQMVDHLENLHADHPRMALAKRMIANTEVNERHLVLPIDELAVHTGFTHRSIVYEREARQMSSAAARQAIENAGLQISDIRMVIVTSCTGFMMPSLTAHLINDLALPTSTVQLPIAQLGCVAGAAAINRANDFARLDARNHVLIVSLEFSSLCYQPDDTKLHAFISAALFGDAVSACVLRADDQAGGFKIKKTESYFLPKSEHYIKYDVKDTGFHFTLDKAVMNSIKDVAPVMERLNYESFEQNCAHNDFFIFHTGGRKILDELVMHLDLASNRVSQSRSSLSEAGNIASVVVFDVLKRQFDSNLNRGDIGLLAAFGPGFTAEMAVGEWTA

SEQ ID NO: 162 - DNA, 5385 bp, Artificial Sequence; identical to SEQ ID NO: 1
  Description of Artificial Sequence: Synthetic pTRC-THNS polynucleotide

SEQ ID NO: 163 - DNA, 8145 bp, Artificial Sequence
  Description of Artificial Sequence: Synthetic pACYC-accABCD/ pACYC-Ptpia-accAD-PrpiA-accCD polynucleotide
gcttttagaaaaactcatcgagcatcaaatgaaactgcaatttattcatatcaggattatcaataccatatttttgaaaaagccgtttctgtaatgaaggagaaaactcaccgaggcagttccataggatggcaagatcctggtatcggtctgcgattccgactcgtccaacatcaatacaacctattaggaaacagctatgaccatgattacgccaagcgcgcaattaaccctcactaaagggaacaaaagctgggtaccgggccccccctcgaggtcgacggtatcgataagcttgatatccactgtggaattcgcccttggcacgtgcgaagttcctattctctagaaagtataggaacttcgtaagaggttccaactttcaccataatgaaataagatcactaccgggcgtattttttgagttatcgagattttcaggagctaaggaagctaaaatggagaaaaaaatcactggatataccaccgttgatatatcccaatggcatcgtaaagaacattttgaggcatttcagtcagttgctcaatgtacctataaccagaccgttcagctggatattacggcctttttaaagaccgtaaagaaaaataagcacaagttttatccggcctttattcacattcttgcccgcctgatgaatgctcatccggaattccgtatggcaatgaaagacggtgagctggtgatatgggatagtgttcacccttgttacaccgttttccatgagcaaactgaaacgttttcatcgctctggagtgaataccacgacgatttccggcagtttctacacatatattcgcaagatgtggcgtgttacggtgaaaacctggcctatttccctaaagggtttattgagaatatgtttttcgtctcagccaatccctgggtgagtttcaccagttttgatttaaacgtggccaatatggacaacttcttcgcccccgttttcaccatgggcaaatattatacgcaaggcgacaaggtgctgatgccgctggcgattcaggttcatcatgccgtttgtgatggcttccatgtcggcagaatgcttaatgaattacaacagtactgcgatgagtggcagggcggggcgtaaacgcgtggatccccctcaagtcaaaagcctcgaagttcctatactttcctagagaataggaacttcgcacgtgccaagggcgaattccacattggtcgctgcagcccgggggatccactagttctagagcggccgcaccgcgggagctccaattcgccctatagtgagtcgtattacgcgcgctcactggccgtcgttttacaaatcaggatattcttctaatacctggaacgctgtttttccggggatcgcagtggtgagtaaccatgcatcatcaggagtacggataaaatgcttgatggtcggaagtggcataaattccgtcagccagtttagtctgaccatctcatctgtaacatcattggcaacgctacctttgccatgtttcagaaacaactctggcgcatcgggcttcccatacaagcgatagattgtcgcacctgattgcccgacattatcgcgagcccatttatacccatataaatcagcatccatgttggaatttaatcgcggcctcgacgtttcccgttgaatatggctcatattcttcctttttcaatattattgaagcatttatcagggttattgtctcatgagcggatacatatttgaatgtatttagaaaaataaacaaataggggtcagtgttacaaccaattaaccaattctgaacattatcgcgagcccatttatacctgaatatggctcataacaccccttgtttgcctggcggcagtagcgcggtggtcccacctgaccccatgccgaactcagaagtgaaacgccgtagcgccgatggtagtgtggggactccccatgcgagagtagggaactgccaggcatcaaataaaacgaaaggctcagtcgaaagactgggcctttcgcccgggctaattagggggtgtcgcccttattcgactctatagggaagttcctattctctagaaagtataggaacttctgaaggggggacagctgtctcaaatgtctcggaatcgctgacgattcccaggtttctccggcaagcatagcgcatggcgtctccatgcgagaatgtcgcgcttgccggataaaaggggagccgctatcggaatggacgcaagccacggccgcagcaggtgcggtcgagggcttccagccagttccagggcagatgtgccggcagaccctcccgctttgggggaggcgcaagccgggtccattcggatagcatctccccatgcaaagtgccggccagggcaatgcccggagccggttcgaggcgccggtttgaataaatgacaaaaagcaaagcctttgtgccgatgaatctctatactgtttcacagacctgctgccctgcggggcggccatcttcctttattcgcttataagcgcggggcaggaggaaaaacatgtccctgaacttcctggacttcgagcagccgattgcagaactggaagcgaagattgacagcctgaccgcggttagccgtcaagatgagaaactggacattaacatcgacgaagaggtccaccgtttgcgtgagaagtctgttgaactgactcgcaaaatctttgctgatttgggcgcatggcagattgcccagttggctcgccacccacaacgcccatataccctggactacgtgcgcctggcgtttgacgagttcgacgaactggcaggcgaccgcgcctatgcggacgataaagcaattgtcggcggtattgctcgtttggatggccgtccggtgatgattatcggccatcaaaaaggccgcgagacgaaagaaaagattcgtcgtaactttggtatgccggcaccggagggctaccgcaaggccctgcgtctgatgcaaatggccgaacgctttaagatgccgattatcacgttcattgatacgccgggtgcgtacccaggcgttggtgcggaagagcgtggtcagagcgaggccatcgcacgtaacctgcgtgagatgtctcgtctgggtgtgccggtcgtttgcaccgtgattggcgagggcggtagcggtggtgcgttggcgatcggtgtcggtgataaggtcaacatgctgcaatacagcacgtacagcgtcattagcccggaaggttgcgcttccattctgtggaagagcgcggataaagcaccattggcagcggaagcgatgggtatcatcgcaccgcgtctgaaagaactgaagttgattgattctatcatcccggaaccgctgggcggtgctcaccgtaatccggaggcgatggcagccagcctgaaggcccagctgctggcggacctggcggatctggacgtgctgagcacggaggatctgaaaaaccgtcgctatcagcgcttgatgagctatggctacgcgtagtaaaggaggaaaatcatgagctggattgaacgcattaagtccaatatcaccccgacccgcaaggcgagcatccctgaaggcgtctggaccaaatgcgatagctgcggtcaggttttgtatcgtgcggagctggagcgtaacctggaagtgtgcccgaaatgcgaccatcacatgcgtatgaccgctcgtaatcgtctgcatagcctgctggatgagggcagcctggtcgagctgggtagcgaactggaaccgaaagatgttctgaaattccgtgattccaagaagtataaggatcgtttggcatctgcacaaaaagaaaccggtgagaaggacgcactggttgttatgaaaggcaccctgtatggtatgccggttgttgctgcggcgttcgagtttgcgtttatgggtggcagcatgggttccgtggtgggcgcacgctttgtgcgtgccgtggagcaggcgctggaggataactgtcctctgatttgtttcagcgcgagcggtggtgcgcgtatgcaagaggccctgatgagcctgatgcagatggcaaaaacctcggcagccctggcgaagatgcaagaacgcggcctgccgtacatttccgtcctgaccgaccctacgatgggcggtgtcagcgccagctttgcgatgctgggtgatttgaacatcgcagagccgaaggctctgattggttttgctggtccgcgtgttattgaacagacggttcgcgaaaagttgccgcctggtttccagcgcagcgagttcctgattgagaaaggtgccatcgacatgatcgttcgccgtccagaaatgcgtctgaaactggcgagcattctggcgaaattgatgaatctgccggctccgaatcctgaagcaccgcgtgagggtgtcgtggttccgccggtcccggaccaagagccggaggcataatagcacgtggagttaaccacgcggcttgccaacggggtctgaatcgctttttttgtatataatgcgtgtgaaatttcataccacaggcgaaggaggaaaaaccatggacattcgtaagatcaagaaactgattgaactggttgaagaaagcggcatcagcgagctggagatcagcgaaggtgaagagagcgtccgtatttcccgtgcggcaccggcagcgagctttccggttatgcagcaagcatacgccgctccgatgatgcaacagccggcacagagcaacgccgctgcaccggcgaccgttccaagcatggaggcaccggcagcggccgagatttcgggtcatatcgtgcgtagcccgatggtgggcaccttctatcgcacgccgtcgccggacgcaaaagccttcatcgaagtcggccagaaggtcaatgtcggcgacacgctgtgtatcgttgaggcaatgaaaatgatgaaccagattgaagcggataagagcggtactgttaaagcgatcctggtggaatccggccagcctgttgagttcgatgaaccgctggttgtgatcgagtaacgaggcgaacatgttggacaagatcgtgattgcaaaccgcggtgaaatcgcgctgcgtatcttgcgcgcgtgtaaagagctgggcattaagactgttgccgtgcattccagcgcagaccgcgacctgaagcatgttctgctggccgacgaaacggtttgcatcggtccggcaccgagcgtgaaaagctatctgaacatcccggccatcatctctgcggcagagatcaccggtgcagtggcgattcatccgggctacggtttcctgagcgagaacgctaactttgctgaacaagtggagcgtagcggtttcatcttcattggccctaaggcggagacgattcgcctgatgggcgacaaagtgagcgccattgcagcgatgaaaaaggccggtgtgccgtgtgttccgggcagcgatggtccgctgggtgacgatatggacaagaaccgtgccatcgctaaacgtattggctacccggtcattatcaaagcctctggtggtggcggtggccgtggtatgcgtgtcgtccgtggtgatgcggaactggcgcaaagcatcagcatgacccgtgcggaagccaaagcggcgttctctaacgatatggtgtatatggagaagtatctggagaatccgcgccacgttgaaatccaagttctggcggatggtcagggcaatgcgatctacttggcagaacgtgattgctccatgcaacgccgtcatcagaaggtggtggaagaggcaccggctccgggtattacgccggaactgcgtcgctacatcggtgagcgctgtgcgaaagcgtgtgtggacattggttaccgtggtgcgggtacgtttgagttcctgttcgaaaatggtgagttttacttcattgaaatgaatacccgcatccaggttgagcacccggtgaccgagatgattactggcgttgatctgatcaaagagcaactgcgcattgcggctggtcagccgctgtcgatcaagcaagaagaggtgcacgttcgtggtcacgcggtcgagtgccgtatcaatgcggaggacccgaatacctttctgccgagccctggtaagatcacgcgttttcacgcgccaggtggttttggcgttcgttgggagtctcacatctacgccggttacaccgtgccgccgtactatgacagcatgattggtaaactgatctgctatggcgaaaatcgtgatgtcgcgatcgcccgcatgaaaaacgcgctgcaagagctgatcattgatggcattaagaccaatgtggatttgcagatccgcattatgaacgacgagaatttccagcacggcggtacgaacattcactacctggaaaagaaactgggcctgcaagagaaataatagggtaccctagcataaccccttggggcctctaaacgggtcttgaggggttttttgaatcccccgggatgtctatcttaaggtagccaaagtttaaactttggctaccttaagatagacatactgccggcctggttcaaccagtcggcagccggcgctggcgcccgcgtattgcggtgcagccagcgcggcgcacaaggcggcgggcgtttcgtttcgccgcccgtttcgcgggccgtcaaggcccgcgaatcgtttctgcccgcgcggcattcctcgctttttgcgccaattcaccgggttttccttaagccccgtcgcttttcttagtgccttgttgggcatagaatcagggcagcggcgcagccagcaccatgttcgtgcagcgcggccctcgcgggggcgaggctgcagacagctgtcaaaatgaagggaagttcctatactttctagagaataggaacttctatagggagtcgaataagggcgacacaaaaggtattctaaatgcataataaatactgataacatcttatagtttgtattatattttgtattatcgttgacatgtataattttgatatcaaaaactgattttccctttattattttcgagatttattttcttaattctctttaacaaactagaaatattgtatatacaaaaaatcataaataatagatgaatagtttaattataggtgttcatcaatcgaaaaagcaacgtatcttatttaaagtgcgttgcttttttctcatttataaggttaaataattctcatatatcaagcaaagtgacaggcgcccttaaatattctgacaaatgctctttccctaaactccccccataaaaaaacccgccgaagcgggtttttacgttatttgcggattaacgattactcgttatcagaaccgcccaggatgcctggcagttccctactctcgccgctgcgctcggtcgttcggctgcgggacctcagcgctagcggagtgtatactggcttactatgttggcactgatgagggtgtcagtgaagtgcttcatgtggcaggagaaaaaaggctgcaccggtgcgtcagcagaatatgtgatacaggatatattccgcttcctcgctcactgactcgctacgctcggtcgttcgactgcggcgagcggaaatggcttacgaacggggcggagatttcctggaagatgccaggaagatacttaacagggaagtgagagggccgcggcaaagccgtttttccataggctccgcccccctgacaagcatcacgaaatctgacgctcaaatcagtggtggcgaaacccgacaggactataaagataccaggcgtttccccctggcggctccctcgtgcgctctcctgttcctgcctttcggtttaccggtgtcattccgctgttatggccgcgtttgtctcattccacgcctgacactcagttccgggtaggcagttcgctccaagctggactgtatgcacgaaccccccgttcagtccgaccgctgcgccttatccggtaactatcgtcttgagtccaacccggaaagacatgcaaaagcaccactggcagcagccactggtaattgatttagaggagttagtcttgaagtcatgcgccggttaaggctaaactgaaaggacaagttttggtgactgcgctcctccaagccagttacctcggttcaaagagttggtagctcagagaaccttcgaaaaaccgccctgcaaggcggttttttcgttttcagagcaagagattacgcgcagaccaaaacgatctcaagaagatcatcttattaa

SEQ ID NO: 164 - DNA, 8894 bp, Artificial Sequence; identical to SEQ ID NO: 3
  Description of Artificial Sequence: Synthetic Ptrc-mcr/ pTRC-Ptrc-mcr polynucleotide

SEQ ID NO: 165 - DNA, 10578 bp, Artificial Sequence; identical to SEQ ID NO: 4
  Description of Artificial Sequence: Synthetic pACYC-accABCD-pntAB/ pACYC-Ptal-pntAB-Ptpia-accAD- PrpiA-accCD polynucleotide

SEQ ID NO: 166 - DNA, 9047 bp, Artificial Sequence; identical to SEQ ID NO: 5
  Description of Artificial Sequence: Synthetic pACYC-CAT-accADBC-udhA/ pACYC-Ptal-udhA-Ptpia-accAD- PrpiA-accCD polynucleotide

SEQ ID NO: 167 - DNA, 5592 bp, Artificial Sequence; identical to SEQ ID NO: 6
  Description of Artificial Sequence: Synthetic pBT3_tpiA-pntAB/ pBT3-PtpiA-pntAB polynucleotide

SEQ ID NO: 168 - DNA, 7059 bp, Artificial Sequence
  Description of Artificial Sequence: Synthetic pTRC-Ptrc-mcr digest polynucleotide
catggccggtacgggtcgtttggctggtaaaattgcattgatcaccggtggtgctggtaacattggttccgagctgacccgccgttttctggccgagggtgcgacggttattatcagcggccgtaaccgtgcgaagctgaccgcgctggccgagcgcatgcaagccgaggccggcgtgccggccaagcgcattgatttggaggtgatggatggttccgaccctgtggctgtccgtgccggtatcgaggcaatcgtcgctcgccacggtcagattgacattctggttaacaacgcgggctccgccggtgcccaacgtcgcttggcggaaattccgctgacggaggcagaattgggtccgggtgcggaggagactttgcacgcttcgatcgcgaatctgttgggcatgggttggcacctgatgcgtattgcggctccgcacatgccagttggctccgcagttatcaacgtttcgactattttctcgcgcgcagagtactatggtcgcattccgtacgttaccccgaaggcagcgctgaacgctttgtcccagctggctgcccgcgagctgggcgctcgtggcatccgcgttaacactattttcccaggtcctattgagtccgaccgcatccgtaccgtgtttcaacgtatggatcaactgaagggtcgcccggagggcgacaccgcccatcactttttgaacaccatgcgcctgtgccgcgcaaacgaccaaggcgctttggaacgccgctttccgtccgttggcgatgttgctgatgcggctgtgtttctggcttctgctgagagcgcggcactgtcgggtgagacgattgaggtcacccacggtatggaactgccggcgtgtagcgaaacctccttgttggcgcgtaccgatctgcgtaccatcgacgcgagcggtcgcactaccctgatttgcgctggcgatcaaattgaagaagttatggccctgacgggcatgctgcgtacgtgcggtagcgaagtgattatcggcttccgttctgcggctgccctggcgcaatttgagcaggcagtgaatgaatctcgccgtctggcaggtgcggatttcaccccgccgatcgctttgccgttggacccacgtgacccggccaccattgatgcggttttcgattggggcgcaggcgagaatacgggtggcatccatgcggcggtcattctgccggcaacctcccacgaaccggctccgtgcgtgattgaagtcgatgacgaacgcgtcctgaatttcctggccgatgaaattaccggcaccatcgttattgcgagccgtttggcgcgctattggcaatcccaacgcctgaccccgggtgcccgtgcccgcggtccgcgtgttatctttctgagcaacggtgccgatcaaaatggtaatgtttacggtcgtattcaatctgcggcgatcggtcaattgattcgcgtttggcgtcacgaggcggagttggactatcaacgtgcatccgccgcaggcgatcacgttctgccgccggtttgggcgaaccagattgtccgtttcgctaaccgctccctggaaggtctggagttcgcgtgcgcgtggaccgcacagctgctgcacagccaacgtcatattaacgaaattacgctgaacattccagccaatattagcgcgaccacgggcgcacgttccgccagcgtcggctgggccgagtccttgattggtctgcacctgggcaaggtggctctgattaccggtggttcggcgggcatcggtggtcaaatcggtcgtctgctggccttgtctggcgcgcgtgtgatgctggccgctcgcgatcgccataaattggaacagatgcaagccatgattcaaagcgaattggcggaggttggttataccgatgtggaggaccgtgtgcacatcgctccgggttgcgatgtgagcagcgaggcgcagctggcagatctggtggaacgtacgctgtccgcattcggtaccgtggattatttgattaataacgccggtattgcgggcgtggaggagatggtgatcgacatgccggtggaaggctggcgtcacaccctgtttgccaacctgatttcgaattattcgctgatgcgcaagttggcgccgctgatgaagaagcaaggtagcggttacatcctgaacgtttcttcctattttggcggtgagaaggacgcggcgattccttatccgaaccgcgccgactacgccgtctccaaggctggccaacgcgcgatggcggaagtgttcgctcgtttcctgggtccagagattcagatcaatgctattgccccaggtccggttgaaggcgaccgcctgcgtggtaccggtgagcgtccgggcctgtttgctcgtcgcgcccgtctgatcttggagaataaacgcctgaacgaattgcacgcggctttgattgctgcggcccgcaccgatgagcgctcgatgcacgagttggttgaattgttgctgccgaacgacgtggccgcgttggagcagaacccagcggcccctaccgcgctgcgtgagctggcacgccgcttccgtagcgaaggtgatccggcggcaagctcctcgtccgccttgctgaatcgctccatcgctgccaagctgttggctcgcttgcataacggtggctatgtgctgccggcggatatttttgcaaatctgcctaatccgccggacccgttctttacccgtgcgcaaattgaccgcgaagctcgcaaggtgcgtgatggtattatgggtatgctgtatctgcagcgtatgccaaccgagtttgacgtcgctatggcaaccgtgtactatctggccgatcgtaacgtgagcggcgaaactttccatccgtctggtggtttgcgctacgagcgtaccccgaccggtggcgagctgttcggcctgccatcgccggaacgtctggcggagctggttggtagcacggtgtacctgatcggtgaacacctgaccgagcacctgaacctgctggctcgtgcctatttggagcgctacggtgcccgtcaagtggtgatgattgttgagacggaaaccggtgcggaaaccatgcgtcgtctgttgcatgatcacgtcgaggcaggtcgcctgatgactattgtggcaggtgatcagattgaggcagcgattgaccaagcgatcacgcgctatggccgtccgggtccggtggtgtgcactccattccgtccactgccaaccgttccgctggtcggtcgtaaagactccgattggagcaccgttttgagcgaggcggaatttgcggaactgtgtgagcatcagctgacccaccatttccgtgttgctcgtaagatcgccttgtcggatggcgcgtcgctggcgttggttaccccggaaacgactgcgactagcaccacggagcaatttgctctggcgaacttcatcaagaccaccctgcacgcgttcaccgcgaccatcggtgttgagtcggagcgcaccgcgcaacgtattctgattaaccaggttgatctgacgcgccgcgcccgtgcggaagagccgcgtgacccgcacgagcgtcagcaggaattggaacgcttcattgaagccgttctgctggttaccgctccgctgcctcctgaggcagacacgcgctacgcaggccgtattcaccgcggtcgtgcgattaccgtctaatagaagcttggctgttttggcggatgagagaagattttcagcctgatacagattaaatcagaacgcagaagcggtctgataaaacagaatttgcctggcggcagtagcgcggtggtcccacctgaccccatgccgaactcagaagtgaaacgccgtagcgccgatggtagtgtggggtctccccatgcgagagtagggaactgccaggcatcaaataaaacgaaaggctcagtcgaaagactgggcctttcgttttatctgttgtttgtcggtgaacgctctcctgagtaggacaaatccgccgggagcggatttgaacgttgcgaagcaacggcccggagggtggcgggcaggacgcccgccataaactgccaggcatcaaattaagcagaaggccatcctgacggatggcctttttgcgtttctacaaactctttttgtttatttttctaaatacattcaaatatgtatccgctcatgagacaataaccctgataaatgcttcaataatattgaaaaaggaagagtatgagtattcaacatttccgtgtcgcccttattcccttttttgcggcattttgccttcctgtttttgctcacccagaaacgctggtgaaagtaaaagatgctgaagatcagttgggtgcacgagtgggttacatcgaactggatctcaacagcggtaagatccttgagagttttcgccccgaagaacgttttccaatgatgagcacttttaaagttctgctatgtggcgcggtattatcccgtgttgacgccgggcaagagcaactcggtcgccgcatacactattctcagaatgacttggttgagtactcaccagtcacagaaaagcatcttacggatggcatgacagtaagagaattatgcagtgctgccataaccatgagtgataacactgcggccaacttacttctgacaacgatcggaggaccgaaggagctaaccgcttttttgcacaacatgggggatcatgtaactcgccttgatcgttgggaaccggagctgaatgaagccataccaaacgacgagcgtgacaccacgatgcctgtagcaatggcaacaacgttgcgcaaactattaactggcgaactacttactctagcttcccggcaacaattaatagactggatggaggcggataaagttgcaggaccacttctgcgctcggcccttccggctggctggtttattgctgataaatctggagccggtgagcgtgggtctcgcggtatcattgcagcactggggccagatggtaagccctcccgtatcgtagttatctacacgacggccttcaactcagcaaaagttcgatttattcaacaaagccacgttgtgtctcaaaatctctgatgttacattgcacaagataaaaatatatcatcatgaacaataaaactgtctgcttacataaacagtaatacaaggggtgttatgagccatattcaacgggaaacgtcttgctcgaggccgcgattaaattccaacatggatgctgatttatatgggtataaatgggctcgcgataatgtcgggcaatcaggtgcgacaatctatcgattgtatgggaagcccgatgcgccagagttgtttctgaaacatggcaaaggtagcgttgccaatgatgttacagatgagatggtcagactaaactggctgacggaatttatgcctcttccgaccatcaagcattttatccgtactcctgatgatgcatggttactcaccactgcgatccccgggaaaacagcattccaggtattagaagaatatcctgattcaggtgaaaatattgttgatgcgctggcagtgttcctgcgccggttgcattcgattcctgtttgtaattgtccttttaacagcgatcgcgtatttcgtctcgctcaggcgcaatcacgaatgaataacggtttggttgatgcgagtgattttgatgacgagcgtaatggctggcctgttgaacaagtctggaaagaaatgcataagcttttgccattctcaccggattcagtcgtcactcatggtgatttctcacttgataaccttatttttgacgaggggaaattaataggttgtattgatgttggacgagtcggaatcgcagaccgataccaggatcttgccatcctatggaactgcctcggtgagttttctccttcattacagaaacggctttttcaaaaatatggtattgataatcctgatatgaataaattgcagtttcatttgatgctcgatgagtttttctaatcgagtcaggcaactatggatgaacgaaatagacagatcgctgagataggtgcctcactgattaagcattggtaactgtcagaccaagtttactcatatatactttagattgatttaaaacttcatttttaatttaaaaggatctaggtgaagatcctttttgataatctcatgaccaaaatcccttaacgtgagttttcgttccactgagcgtcagaccccgtagaaaagatcaaaggatcttcttgagatcctttttttctgcgcgtaatctgctgcttgcaaacaaaaaaaccaccgctaccagcggtggtttgtttgccggatcaagagctaccaactctttttccgaaggtaactggcttcagcagagcgcagataccaaatactgtccttctagtgtagccgtagttaggccaccacttcaagaactctgtagcaccgcctacatacctcgctctgctaatcctgttaccagtggctgctgccagtggcgataagtcgtgtcttaccgggttggactcaagacgatagttaccggataaggcgcagcggtcgggctgaacggggggttcgtgcacacagcccagcttggagcgaacgacctacaccgaactgagatacctacagcgtgagctatgagaaagcgccacgcttcccgaagggagaaaggcggacaggtatccggtaagcggcagggtcggaacaggagagcgcacgagggagcttccagggggaaacgcctggtatctttatagtcctgtcgggtttcgccacctctgacttgagcgtcgatttttgtgatgctcgtcaggggggcggagcctatggaaaaacgccagcaacgcggcctttttacggttcctggccttttgctggccttttgctcacatgttctttcctgcgttatcccctgattctgtggataaccgtattaccgcctttgagtgagctgataccgctcgccgcagccgaacgaccgagcgcagcgagtcagtgagcgaggaagcggaagagcgcctgatgcggtattttctccttacgcatctgtgcggtatttcacaccgcatatggtgcactctcagtacaatctgctctgatgccgcatagttaagccagta

SEQ ID NO: 169 - DNA, 2172 bp, Artificial Sequence
  Description of Artificial Sequence: Synthetic pIDTSMART-PyibD polynucleotide
cccgtgtaaaacgacggccagtttatctagtcagcttgattctagctgatcgtggaccggaaggtgagccagtgagttgattgcagtccagttacgctggagtctgaggctcgtcctgaatgatatgcggcctccacgtgcgtaattgtgctgatctcttatatagctgctctcattatctctctaccctgaagtgactctctcacctgtaaaaataatatctcacaggcttaatagtttcttaatacaaagcctgtaaaacgtcaggataacttctgtgtaggaggataatccatggaattccgcacgtggcgcgtgatcttacggcattatacgtatgatcggtccacgatcagctagattatctagtcagcttgatgtcatagctgtttcctgaggctcaatactgaccatttaaatcatacctgacctccatagcagaaagtcaaaagcctccgaccggaggcttttgacttgatcggcacgtaagaggttccaactttcaccataatgaaataagatcactaccgggcgtattttttgagttatcgagattttcaggagctaaggaagctaaaatgagtattcaacatttccgtgtcgcccttattcccttttttgcggcattttgccttcctgtttttgctcacccagaaacgctggtgaaagtaaaagatgctgaagatcagttgggtgcacgagtgggttacatcgaactggatctcaacagcggtaagatccttgagagtttacgccccgaagaacgttttccaatgatgagcacttttaaagttctgctatgtggcgcggtattatcccgtattgacgccgggcaagagcaactcggtcgccgcatacactattctcagaatgacttggttgagtactcaccagtcacagaaaagcatctcacggatggcatgacagtaagagaattatgcagtgctgccataaccatgagtgataacactgcggccaacttacttctggcaacgatcggaggaccgaaggagctaaccgcttttttgcacaacatgggggatcatgtaactcgccttgatcgttgggaaccggagctgaatgaagccataccaaacgacgagcgtgacaccacgatgcctgtagcaatggcaacaacgttgcgcaaactattaactggcgaactacttactctagcttcccggcaacaattaatagactggatggaggcggataaagttgcaggatcacttctgcgctcggccctcccggctggctggtttattgctgataaatctggagccggtgagcgtgggtctcgcggtatcattgcagcactggggccagatggtaagccctcccgcatcgtagttatctacacgacggggagtcaggcaactatggatgaacgaaatagacagatcgctgagataggtgcctcactgattaagcattggtaatgagggcccaaatgtaatcacctggctcaccttcgggtgggcctttcttgaggacctaaatgtaatcacctggctcaccttcgggtgggcctttctgcgttgctggcgtttttccataggctccgcccccctgacgagcatcacaaaaatcgatgctcaagtcagaggtggcgaaacccgacaggactataaagataccaggcgtttccccctggaagctccctcgtgcgctctcctgttccgaccctgccgcttaccggatacctgtccgcctttctcccttcgggaagcgtggcgctttctcatagctcacgctgtaggtatctcagttcggtgtaggtcgttcgctccaagctgggctgtgtgcacgaaccccccgttcagcccgaccgctgcgccttatccggtaactatcgtcttgagtccaacccggtaagacacgacttatcgccactggcagcagccactggtaacaggattagcagagcgaggtatgtaggcggtgctacagagttcttgaagtggtggcctaactacggctacactagaagaacagtatttggtatctgcgctctgctgaagccagttacctcggaaaaagagttggtagctcttgatccggcaaacaaaccaccgctggtagcggtggtttttttgtttgcaagcagcagattacgcgcagaaaaaaaggatctcaagaagatcctttgattttctaccgaagaaaggccca

SEQ ID NO: 170 - DNA, 7215 bp, Artificial Sequence
  Description of Artificial Sequence: Synthetic pTRC-PyibD-mcr polynucleotide
ccttcaactcagcaaaagttcgatttattcaacaaagccacgttgtgtctcaaaatctctgatgttacattgcacaagataaaaatatatcatcatgaacaataaaactgtctgcttacataaacagtaatacaaggggtgttatgagccatattcaacgggaaacgtcttgctcgaggccgcgattaaattccaacatggatgctgatttatatgggtataaatgggctcgcgataatgtcgggcaatcaggtgcgacaatctatcgattgtatgggaagcccgatgcgccagagttgtttctgaaacatggcaaaggtagcgttgccaatgatgttacagatgagatggtcagactaaactggctgacggaatttatgcctcttccgaccatcaagcattttatccgtactcctgatgatgcatggttactcaccactgcgatccccgggaaaacagcattccaggtattagaagaatatcctgattcaggtgaaaatattgttgatgcgctggcagtgttcctgcgccggttgcattcgattcctgtttgtaattgtccttttaacagcgatcgcgtatttcgtctcgctcaggcgcaatcacgaatgaataacggtttggttgatgcgagtgattttgatgacgagcgtaatggctggcctgttgaacaagtctggaaagaaatgcataagcttttgccattctcaccggattcagtcgtcactcatggtgatttctcacttgataaccttatttttgacgaggggaaattaataggttgtattgatgttggacgagtcggaatcgcagaccgataccaggatcttgccatcctatggaactgcctcggtgagttttctccttcattacagaaacggctttttcaaaaatatggtattgataatcctgatatgaataaattgcagtttcatttgatgctcgatgagtttttctaatcgagtcaggcaactatggatgaacgaaatagacagatcgctgagataggtgcctcactgattaagcattggtaactgtcagaccaagtttactcatatatactttagattgatttaaaacttcatttttaatttaaaaggatctaggtgaagatcctttttgataatctcatgaccaaaatcccttaacgtgagttttcgttccactgagcgtcagaccccgtagaaaagatcaaaggatcttcttgagatcctttttttctgcgcgtaatctgctgcttgcaaacaaaaaaaccaccgctaccagcggtggtttgtttgccggatcaagagctaccaactctttttccgaaggtaactggcttcagcagagcgcagataccaaatactgtccttctagtgtagccgtagttaggccaccacttcaagaactctgtagcaccgcctacatacctcgctctgctaatcctgttaccagtggctgctgccagtggcgataagtcgtgtcttaccgggttggactcaagacgatagttaccggataaggcgcagcggtcgggctgaacggggggttcgtgcacacagcccagcttggagcgaacgacctacaccgaactgagatacctacagcgtgagctatgagaaagcgccacgcttcccgaagggagaaaggcggacaggtatccggtaagcggcagggtcggaacaggagagcgcacgagggagcttccagggggaaacgcctggtatctttatagtcctgtcgggtttcgccacctctgacttgagcgtcgatttttgtgatgctcgtcaggggggcggagcctatggaaaaacgccagcaacgcggcctttttacggttcctggccttttgctggccttttgctcacatgttctttcctgcgttatcccctgattctgtggataaccgtattaccgcctttgagtgagctgataccgctcgccgcagccgaacgaccgagcgcagcgagtcagtgagcgaggaagcggaagagcgcctgatgcggtattttctccttacgcatctgtgcggtatttcacaccgcatatggtgcactctcagtacaatctgctctgatgccgcatagttaagccagtagtgcgtaattgtgctgatctcttatatagctgctctcattatctctctaccctgaagtgactctctcacctgtaaaaataatatctcacaggcttaatagtttcttaatacaaagcctgtaaaacgtcaggataacttctgtgtaggaggataatccatggccggtacgggtcgtttggctggtaaaattgcattgatcaccggtggtgctggtaacattggttccgagctgacccgccgttttctggccgagggtgcgacggttattatcagcggccgtaaccgtgcgaagctgaccgcgctggccgagcgcatgcaagccgaggccggcgtgccggccaagcgcattgatttggaggtgatggatggttccgaccctgtggctgtccgtgccggtatcgaggcaatcgtcgctcgccacggtcagattgacattctggttaacaacgcgggctccgccggtgcccaacgtcgcttggcggaaattccgctgacggaggcagaattgggtccgggtgcggaggagactttgcacgcttcgatcgcgaatctgttgggcatgggttggcacctgatgcgtattgcggctccgcacatgccagttggctccgcagttatcaacgtttcgactattttctcgcgcgcagagtactatggtcgcattccgtacgttaccccgaaggcagcgctgaacgctttgtcccagctggctgcccgcgagctgggcgctcgtggcatccgcgttaacactattttcccaggtcctattgagtccgaccgcatccgtaccgtgtttcaacgtatggatcaactgaagggtcgcccggagggcgacaccgcccatcactttttgaacaccatgcgcctgtgccgcgcaaacgaccaaggcgctttggaacgccgctttccgtccgttggcgatgttgctgatgcggctgtgtttctggcttctgctgagagcgcggcactgtcgggtgagacgattgaggtcacccacggtatggaactgccggcgtgtagcgaaacctccttgttggcgcgtaccgatctgcgtaccatcgacgcgagcggtcgcactaccctgatttgcgctggcgatcaaattgaagaagttatggccctgacgggcatgctgcgtacgtgcggtagcgaagtgattatcggcttccgttctgcggctgccctggcgcaatttgagcaggcagtgaatgaatctcgccgtctggcaggtgcggatttcaccccgccgatcgctttgccgttggacccacgtgacccggccaccattgatgcggttttcgattggggcgcaggcgagaatacgggtggcatccatgcggcggtcattctgccggcaacctcccacgaaccggctccgtgcgtgattgaagtcgatgacgaacgcgtcctgaatttcctggccgatgaaattaccggcaccatcgttattgcgagccgtttggcgcgctattggcaatcccaacgcctgaccccgggtgcccgtgcccgcggtccgcgtgttatctttctgagcaacggtgccgatcaaaatggtaatgtttacggtcgtattcaatctgcggcgatcggtcaattgattcgcgtttggcgtcacgaggcggagttggactatcaacgtgcatccgccgcaggcgatcacgttctgccgccggtttgggcgaaccagattgtccgtttcgctaaccgctccctggaaggtctggagttcgcgtgcgcgtggaccgcacagctgctgcacagccaacgtcatattaacgaaattacgctgaacattccagccaatattagcgcgaccacgggcgcacgttccgccagcgtcggctgggccgagtccttgattggtctgcacctgggcaaggtggctctgattaccggtggttcggcgggcatcggtggtcaaatcggtcgtctgctggccttgtctggcgcgcgtgtgatgctggccgctcgcgatcgccataaattggaacagatgcaagccatgattcaaagcgaattggcggaggttggttataccgatgtggaggaccgtgtgcacatcgctccgggttgcgatgtgagcagcgaggcgcagctggcagatctggtggaacgtacgctgtccgcattcggtaccgtggattatttgattaataacgccggtattgcgggcgtggaggagatggtgatcgacatgccggtggaaggctggcgtcacaccctgtttgccaacctgatttcgaattattcgctgatgcgcaagttggcgccgctgatgaagaagcaaggtagcggttacatcctgaacgtttcttcctattttggcggtgagaaggacgcggcgattccttatccgaaccgcgccgactacgccgtctccaaggctggccaacgcgcgatggcggaagtgttcgctcgtttcctgggtccagagattcagatcaatgctattgccccaggtccggttgaaggcgaccgcctgcgtggtaccggtgagcgtccgggcctgtttgctcgtcgcgcccgtctgatcttggagaataaacgcctgaacgaattgcacgcggctttgattgctgcggcccgcaccgatgagcgctcgatgcacgagttggttgaattgttgctgccgaacgacgtggccgcgttggagcagaacccagcggcccctaccgcgctgcgtgagctggcacgccgcttccgtagcgaaggtgatccggcggcaagctcctcgtccgccttgctgaatcgctccatcgctgccaagctgttggctcgcttgcataacggtggctatgtgctgccggcggatatttttgcaaatctgcctaatccgccggacccgttctttacccgtgcgcaaattgaccgcgaagctcgcaaggtgcgtgatggtattatgggtatgctgtatctgcagcgtatgccaaccgagtttgacgtcgctatggcaaccgtgtactatctggccgatcgtaacgtgagcggcgaaactttccatccgtctggtggtttgcgctacgagcgtaccccgaccggtggcgagctgttcggcctgccatcgccggaacgtctggcggagctggttggtagcacggtgtacctgatcggtgaacacctgaccgagcacctgaacctgctggctcgtgcctatttggagcgctacggtgcccgtcaagtggtgatgattgttgagacggaaaccggtgcggaaaccatgcgtcgtctgttgcatgatcacgtcgaggcaggtcgcctgatgactattgtggcaggtgatcagattgaggcagcgattgaccaagcgatcacgcgctatggccgtccgggtccggtggtgtgcactccattccgtccactgccaaccgttccgctggtcggtcgtaaagactccgattggagcaccgttttgagcgaggcggaatttgcggaactgtgtgagcatcagctgacccaccatttccgtgttgctcgtaagatcgccttgtcggatggcgcgtcgctggcgttggttaccccggaaacgactgcgactagcaccacggagcaatttgctctggcgaacttcatcaagaccaccctgcacgcgttcaccgcgaccatcggtgttgagtcggagcgcaccgcgcaacgtattctgattaaccaggttgatctgacgcgccgcgcccgtgcggaagagccgcgtgacccgcacgagcgtcagcaggaattggaacgcttcattgaagccgttctgctggttaccgctccgctgcctcctgaggcagacacgcgctacgcaggccgtattcaccgcggtcgtgcgattaccgtctaatagaagcttggctgttttggcggatgagagaagattttcagcctgatacagattaaatcagaacgcagaagcggtctgataaaacagaatttgcctggcggcagtagcgcggtggtcccacctgaccccatgccgaactcagaagtgaaacgccgtagcgccgatggtagtgtggggtctccccatgcgagagtagggaactgccaggcatcaaataaaacgaaaggctcagtcgaaagactgggcctttcgttttatctgttgtttgtcggtgaacgctctcctgagtaggacaaatccgccgggagcggatttgaacgttgcgaagcaacggcccggagggtggcgggcaggacgcccgccataaactgccaggcatcaaattaagcagaaggccatcctgacggatggcctttttgcgtttctacaaactctttttgtttatttttctaaatacattcaaatatgtatccgctcatgagacaataaccctgataaatgcttcaataatattgaaaaaggaagagtatgagtattcaacatttccgtgtcgcccttattcccttttttgcggcattttgccttcctgtttttgctcacccagaaacgctggtgaaagtaaaagatgctgaagatcagttgggtgcacgagtgggttacatcgaactggatctcaacagcggtaagatccttgagagttttcgccccgaagaacgttttccaatgatgagcacttttaaagttctgctatgtggcgcggtattatcccgtgttgacgccgggcaagagcaactcggtcgccgcatacactattctcagaatgacttggttgagtactcaccagtcacagaaaagcatcttacggatggcatgacagtaagagaattatgcagtgctgccataaccatgagtgataacactgcggccaacttacttctgacaacgatcggaggaccgaaggagctaaccgcttttttgcacaacatgggggatcatgtaactcgccttgatcgttgggaaccggagctgaatgaagccataccaaacgacgagcgtgacaccacgatgcctgtagcaatggcaacaacgttgcgcaaactattaactggcgaactacttactctagcttcccggcaacaattaatagactggatggaggcggataaagttgcaggaccacttctgcgctcggcccttccggctggctggtttattgctgataaatctggagccggtgagcgtgggtctcgcggtatcattgcagcactggggccagatggtaagccctcccgtatcgtagttatctacacgacgg

SEQ ID NO: 171 - DNA, 75 bp, Artificial Sequence
  Description of Artificial Sequence: Synthetic PT5 oligonucleotide
taactacttaaaaatttcagttgcttaatcctacaattcttgatataatattctcatagtttgaaagaactattc

SEQ ID NO: 172 - DNA, 6421 bp, Artificial Sequence
  Description of Artificial Sequence: Synthetic T5-aceEF-lpd polynucleotide
agatcttaactacttaaaaatttcagttgcttaatcctacaattcttgatataatattctcatagtttgaaagaactattcagatagataaggaataacccatgtcagaacgtttcccaaatgacgtggatccgatcgaaactcgcgactggctccaggcgatcgaatcggtcatccgtgaagaaggtgttgagcgtgctcagtatctgatcgaccaactgcttgctgaagcccgcaaaggcggtgtaaacgtagccgcaggcacaggtatcagcaactacatcaacaccatccccgttgaagaacaaccggagtatccgggtaatctggaactggaacgccgtattcgttcagctatccgctggaacgccatcatgacggtgctgcgtgcgtcgaaaaaagacctcgaactgggcggccatatggcgtccttccagtcttccgcaaccatttatgatgtgtgctttaaccacttcttccgtgcacgcaacgagcaggatggcggcgacctggtttacttccagggccacatctccccgggcgtgtacgctcgtgctttcctggaaggtcgtctgactcaggagcagctggataacttccgtcaggaagttcacggcaatggcctctcttcctatccgcacccgaaactgatgccggaattctggcagttcccgaccgtatctatgggtctgggtccgattggtgctatttaccaggctaaattcctgaaatatctggaacaccgtggcctgaaagatacctctaaacaaaccgtttacgcgttcctcggtgacggtgaaatggacgaaccggaatccaaaggtgcgatcaccatcgctacccgtgaaaaactggataacctggtcttcgttatcaactgtaacctgcagcgtcttgacggcccggtcaccggtaacggcaagatcatcaacgaactggaaggcatcttcgaaggtgctggctggaacgtgatcaaagtgatgtggggtagccgttgggatgaactgctgcgtaaggataccagcggtaaactgatccagctgatgaacgaaaccgttgacggcgactaccagaccttcaaatcgaaagatggtgcgtacgttcgtgaacacttcttcggtaaatatcctgaaaccgcagcactggttgcagactggactgacgagcagatctgggcactgaaccgtggtggtcacgatccgaagaaaatctacgctgcattcaagaaagcgcaggaaaccaaaggcaaagcgacagtaatccttgctcataccattaaaggttacggcatgggcgacgcggctgaaggtaaaaacatcgcgcaccaggttaagaaaatgaacatggacggtgtgcgtcatatccgcgaccgtttcaatgtgccggtgtctgatgcagatatcgaaaaactgccgtacatcaccttcccggaaggttctgaagagcatacctatctgcacgctcagcgtcagaaactgcacggttatctgccaagccgtcagccgaacttcaccgagaagcttgagctgccgagcctgcaagacttcggcgcgctgttggaagagcagagcaaagagatctctaccactatcgctttcgttcgtgctctgaacgtgatgctgaagaacaagtcgatcaaagatcgtctggtaccgatcatcgccgacgaagcgcgtactttcggtatggaaggtctgttccgtcagattggtatttacagcccgaacggtcagcagtacaccccgcaggaccgcgagcaggttgcttactataaagaagacgagaaaggtcagattctgcaggaagggatcaacgagctgggcgcaggttgttcctggctggcagcggcgacctcttacagcaccaacaatctgccgatgatcccgttctacatctattactcgatgttcggcttccagcgtattggcgatctgtgctgggcggctggcgaccagcaagcgcgtggcttcctgatcggcggtacttccggtcgtaccaccctgaacggcgaaggtctgcagcacgaagatggtcacagccacattcagtcgctgactatcccgaactgtatctcttacgacccggcttacgcttacgaagttgctgtcatcatgcatgacggtctggagcgtatgtacggtgaaaaacaagagaacgtttactactacatcactacgctgaacgaaaactaccacatgccggcaatgccggaaggtgctgaggaaggtatccgtaaaggtatctacaaactcgaaactattgaaggtagcaaaggtaaagttcagctgctcggctccggttctatcctgcgtcacgtccgtgaagcagctgagatcctggcgaaagattacggcgtaggttctgacgtttatagcgtgacctccttcaccgagctggcgcgtgatggtcaggattgtgaacgctggaacatgctgcacccgctggaaactccgcgcgttccgtatatcgctcaggtgatgaacgacgctccggcagtggcatctaccgactatatgaaactgttcgctgagcaggtccgtacttacgtaccggctgacgactaccgcgtactgggtactgatggcttcggtcgttccgacagccgtgagaacctgcgtcaccacttcgaagttgatgcttcttatgtcgtggttgcggcgctgggcgaactggctaaacgtggcgaaatcgataagaaagtggttgctgacgcaatcgccaaattcaacatcgatgcagataaagttaacccgcgtctggcgtaagaggtaaaagaataatggctatcgaaatcaaagtaccggacatcggggctgatgaagttgaaatcaccgagatcctggtcaaagtgggcgacaaagttgaagccgaacagtcgctgatcaccgtagaaggcgacaaagcctctatggaagttccgtctccgcaggcgggtatcgttaaagagatcaaagtctctgttggcgataaaacccagaccggcgcactgattatgattttcgattccgccgacggtgcagcagacgctgcacctgctcaggcagaagagaagaaagaagcagctccggcagcagcaccagcggctgcggcggcaaaagacgttaacgttccggatatcggcagcgacgaagttgaagtgaccgaaatcctggtgaaagttggcgataaagttgaagctgaacagtcgctgatcaccgtagaaggcgacaaggcttctatggaagttccggctccgtttgctggcaccgtgaaagagatcaaagtgaacgtgggtgacaaagtgtctaccggctcgctgattatggtcttcgaagtcgcgggtgaagcaggcgcggcagctccggccgctaaacaggaagcagctccggcagcggcccctgcaccagcggctggcgtgaaagaagttaacgttccggatatcggcggtgacgaagttgaagtgactgaagtgatggtgaaagtgggcgacaaagttgccgctgaacagtcactgatcaccgtagaaggcgacaaagcttctatggaagttccggcgccgtttgcaggcgtcgtgaaggaactgaaagtcaacgttggcgataaagtgaaaactggctcgctgattatgatcttcgaagttgaaggcgcagcgcctgcggcagctcctgcgaaacaggaagcggcagcgccggcaccggcagcaaaagctgaagccccggcagcagcaccagctgcgaaagcggaaggcaaatctgaatttgctgaaaacgacgcttatgttcacgcgactccgctgatccgccgtctggcacgcgagtttggtgttaaccttgcgaaagtgaagggcactggccgtaaaggtcgtatcctgcgcgaagacgttcaggcttacgtgaaagaagctatcaaacgtgcagaagcagctccggcagcgactggcggtggtatccctggcatgctgccgtggccgaaggtggacttcagcaagtttggtgaaatcgaagaagtggaactgggccgcatccagaaaatctctggtgcgaacctgagccgtaactgggtaatgatcccgcatgttactcacttcgacaaaaccgatatcaccgagttggaagcgttccgtaaacagcagaacgaagaagcggcgaaacgtaagctggatgtgaagatcaccccggttgtcttcatcatgaaagccgttgctgcagctcttgagcagatgcctcgcttcaatagttcgctgtcggaagacggtcagcgtctgaccctgaagaaatacatcaacatcggtgtggcggtggataccccgaacggtctggttgttccggtattcaaagacgtcaacaagaaaggcatcatcgagctgtctcgcgagctgatgactatttctaagaaagcgcgtgacggtaagctgactgcgggcgaaatgcagggcggttgcttcaccatctccagcatcggcggcctgggtactacccacttcgcgccgattgtgaacgcgccggaagtggctatcctcggcgtttccaagtccgcgatggagccggtgtggaatggtaaagagttcgtgccgcgtctgatgctgccgatttctctctccttcgaccaccgcgtgatcgacggtgctgatggtgcccgtttcattaccatcattaacaacacgctgtctgacattcgccgtctggtgatgtaagtaaaagagccggcccaacggccggcttttttctggtaatctcatgaatgtattgaggttattagcgaatagacaaatcggttgccgtttgttgtttaaaaattgttaacaattttgtaaaataccgacggatagaacgacccggtggtggttagggtattacttcacataccctatggatttctgggtgcagcaaggtagcaagcgccagaatccccaggagcttacataagtaagtgactggggtgagggcgtgaagctaacgccgctgcggcctgaaagacgacgggtatgaccgccggagataaatatatagaggtcatgatgagtactgaaatcaaaactcaggtcgtggtacttggggcaggccccgcaggttactccgctgccttccgttgcgctgatttaggtctggaaaccgtaatcgtagaacgttacaacacccttggcggtgtttgcctgaacgtcggctgtatcccttctaaagcactgctgcacgtagcaaaagttatcgaagaagccaaagcgctggctgaacacggtatcgtcttcggcgaaccgaaaaccgatatcgacaagattcgtacctggaaagagaaagtgatcaatcagctgaccggtggtctggctggtatggcgaaaggccgcaaagtcaaagtggtcaacggtctgggtaaattcaccggggctaacaccctggaagttgaaggtgagaacggcaaaaccgtgatcaacttcgacaacgcgatcattgcagcgggttctcgcccgatccaactgccgtttattccgcatgaagatccgcgtatctgggactccactgacgcgctggaactgaaagaagtaccagaacgcctgctggtaatgggtggcggtatcatcggtctggaaatgggcaccgtttaccacgcgctgggttcacagattgacgtggttgaaatgttcgaccaggttatcccggcagctgacaaagacatcgttaaagtcttcaccaagcgtatcagcaagaaattcaacctgatgctggaaaccaaagttaccgccgttgaagcgaaagaagacggcatttatgtgacgatggaaggcaaaaaagcacccgctgaaccgcagcgttacgacgccgtgctggtagcgattggtcgtgtgccgaacggtaaaaacctcgacgcaggcaaagcaggcgtggaagttgacgaccgtggtttcatccgcgttgacaaacagctgcgtaccaacgtaccgcacatctttgctatcggcgatatcgtcggtcaaccgatgctggcacacaaaggtgttcacgaaggtcacgttgccgctgaagttatcgccggtaagaaacactacttcgatccgaaagttatcccgtccatcgcctataccgaaccagaagttgcatgggtgggtctgactgagaaagaagcgaaagagaaaggcatcagctatgaaaccgccaccttcccgtgggctgcttctggtcgtgctatcgcttccgactgcgcagacggtatgaccaagctgattttcgacaaagaatctcaccgtgtgatcggtggtgcgattgtcggtactaacggcggcgagctgctgggtgaaatcggcctggcaatcgaaatgggttgtgatgctgaagacatcgcactgaccatccacgcgcacccgactctgcacgagtctgtgggcctggcggcagaagtgttcgaaggtagcattaccgacctgccgaacccgaaagcgaagaagaagtaa

SEQ ID NO: 173 - DNA, 951 bp, Artificial Sequence
  Description of Artificial Sequence: Synthetic coaA polynucleotide
atgagtataaaagagcaaacgttaatgacgccttacctacagtttgaccgcaaccagtgggcagctctgcgtgattccgtacctatgacgttatcggaagatgagatcgcccgtctcaaaggtattaatgaagatctctcgttagaagaagttgccgagatctatttacctttgtcacgtttgctgaacttctatataagctcgaatctgcgccgtcaggcagttctggaacagtttcttggtaccaacgggcaacgcattccttacattatcagtattgctggcagtgtcgcggtggggaaaagtacaacggcggctgtgctccaggcgctattaagccgttggccggaacatcgtcgtgttgaactgatcactacagatggcttccttcaccctaatcaggttctgaaagaacgtggtctgatgaagaagaaaggcttcccggaatcgtatgatatgcatcgcctggtgaagtttgtttccgatctcaaatccggcgtgccaaacgttacagcacctgtttactcacatcttatttatgatgtgatcccggatggagataaaacggttgttcagcctgatattttaattcttgaagggttaaatgtcttacagagcgggatggattatccacacgatccacatcatgtatttgtttctgattttgtcgatttttcgatatatgttgatgcaccggaagacttacttcagacatggtatatcaaccgttttctgaaattccgcgaaggggcttttaccgacccggattcctattttcataactacgcgaaattaactaaagaagaagcgattaagactgccatgacattgtggaaagagatcaactggctgaacttaaagcaaaatattctacctactcgtgagcgcgccagtttaatcctgacgaaaagtgctaatcatgcggtagaagaggtcagactacgcaaataa

SEQ ID NO: 174 - DNA, 10138 bp, Artificial Sequence
  Description of Artificial Sequence: Synthetic pTRC-Ptrc-mcr-Pkan-gapA polynucleotide
ccttcaactcagcaaaagttcgatttattcaacaaagccacgttgtgtctcaaaatctctgatgttacattgcacaagataaaaatatatcatcatgaacaataaaactgtctgcttacataaacagtaatacaaggggtgttatgagccatattcaacgggaaacgtcttgctcgaggccgcgattaaattccaacatggatgctgatttatatgggtataaatgggctcgcgataatgtcgggcaatcaggtgcgacaatctatcgattgtatgggaagcccgatgcgccagagttgtttctgaaacatggcaaaggtagcgttgccaatgatgttacagatgagatggtcagactaaactggctgacggaatttatgcctcttccgaccatcaagcattttatccgtactcctgatgatgcatggttactcaccactgcgatccccgggaaaacagcattccaggtattagaagaatatcctgattcaggtgaaaatattgttgatgcgctggcagtgttcctgcgccggttgcattcgattcctgtttgtaattgtccttttaacagcgatcgcgtatttcgtctcgctcaggcgcaatcacgaatgaataacggtttggttgatgcgagtgattttgatgacgagcgtaatggctggcctgttgaacaagtctggaaagaaatgcataagcttttgccattctcaccggattcagtcgtcactcatggtgatttctcacttgataaccttatttttgacgaggggaaattaataggttgtattgatgttggacgagtcggaatcgcagaccgataccaggatcttgccatcctatggaactgcctcggtgagttttctccttcattacagaaacggctttttcaaaaatatggtattgataatcctgatatgaataaattgcagtttcatttgatgctcgatgagtttttctaatcgagtcaggcaactatggatgaacgaaatagacagatcgctgagataggtgcctcactgattaagcattggtaactgtcagaccaagtttactcatatatactttagattgatttaaaacttcatttttaatttaaaaggatctaggtgaagatcctttttgataatctcatgaccaaaatcccttaacgtgagttttcgttccactgagcgtcagaccccgtagaaaagatcaaaggatcttcttgagatcctttttttctgcgcgtaatctgctgcttgcaaacaaaaaaaccaccgctaccagcggtggtttgtttgccggatcaagagctaccaactctttttccgaaggtaactggcttcagcagagcgcagataccaaatactgtccttctagtgtagccgtagttaggccaccacttcaagaactctgtagcaccgcctacatacctcgctctgctaatcctgttaccagtggctgctgccagtggcgataagtcgtgtcttaccgggttggactcaagacgatagttaccggataaggcgcagcggtcgggctgaacggggggttcgtgcacacagcccagcttggagcgaacgacctacaccgaactgagatacctacagcgtgagctatgagaaagcgccacgcttcccgaagggagaaaggcggacaggtatccggtaagcggcagggtcggaacaggagagcgcacgagggagcttccagggggaaacgcctggtatctttatagtcctgtcgggtttcgccacctctgacttgagcgtcgatttttgtgatgctcgtcaggggggcggagcctatggaaaaacgccagcaacgcggcctttttacggttcctggccttttgctggccttttgctcacatgttctttcctgcgttatcccctgattctgtggataaccgtattaccgcctttgagtgagctgataccgctcgccgcagccgaacgaccgagcgcagcgagtcagtgagcgaggaagcggaagagcgcctgatgcggtattttctccttacgcatctgtgcggtatttcacaccgcatacagtccagttacgctggagtctgaggctcgtcctgaatgatatcaagcttccggaattgccagctggggcgccctctggtaaggttgggaagccctgcaaagtaaactggatggctttcttgccgccaaggatctgatggcgcaggggatcaagctctgatcaagagacaggatgaggatcgtttcgatgactatcaaagtaggtatcaacggttttggccgtatcggtcgcattgttttccgtgctgctcagaaacgttctgacatcgagatcgttgcaatcaacgacctgttagacgctgattacatggcatacatgctgaaatatgactccactcacggccgtttcgacggtaccgttgaagtgaaagacggtcatctgatcgttaacggtaaaaaaatccgtgttaccgctgaacgtgatccggctaacctgaaatgggacgaagttggtgttgacgttgtcgctgaagcaactggtctgttcctgactgacgaaactgctcgtaaacacatcaccgctggtgcgaagaaagtggttatgactggtccgtctaaagacaacactccgatgttcgttaaaggcgctaacttcgacaaatatgctggccaggacatcgtttccaacgcttcctgcaccaccaactgcctggctccgctggctaaagttatcaacgataacttcggcatcatcgaaggtctgatgaccaccgttcacgctactaccgctactcagaaaaccgttgatggcccgtctcacaaagactggcgcggcggccgcggcgcttcccagaacatcatcccgtcctctaccggtgctgctaaagctgtaggtaaagtactgccagaactgaatggcaaactgactggtatggcgttccgcgttccgaccccgaacgtatctgtagttgacctgaccgttcgtctggaaaaagctgcaacttacgagcagatcaaagctgccgttaaagctgctgctgaaggcgaaatgaaaggcgttctgggctacaccgaagatgacgtagtatctaccgatttcaacggcgaagtttgcacttccgtgttcgatgctaaagctggtatcgctctgaacgacaacttcgtgaaactggtatcctggtacgacaacgaaaccggttactccaacaaagttctggacctgatcgctcacatctccaaataagatcctagacgaattctctagatatcgctcaatactgaccatttaaatcatacctgacctatggtgcactctcagtacaatctgctctgatgccgcatagttaagccagtatacactccgctatcgctacgtgactgggtcatggctgcgccccgacacccgccaacacccgctgacgcgccctgacgggcttgtctgctcccggcatccgcttacagacaagctgtgaccgtctccgggagctgcatgtgtcagaggttttcaccgtcatcaccgaaacgcgcgaggcagcagatcaattcgcgcgcgaaggcgaagcggcatgcatttacgttgacaccatcgaatggtgcaaaacctttcgcggtatggcatgatagcgcccggaagagagtcaattcagggtggtgaatgtgaaaccagtaacgttatacgatgtcgcagagtatgccggtgtctcttatcagaccgtttcccgcgtggtgaaccaggccagccacgtttctgcgaaaacgcgggaaaaagtggaagcggcgatggcggagctgaattacattcccaaccgcgtggcacaacaactggcgggcaaacagtcgttgctgattggcgttgccacctccagtctggccctgcacgcgccgtcgcaaattgtcgcggcgattaaatctcgcgccgatcaactgggtgccagcgtggtggtgtcgatggtagaacgaagcggcgtcgaagcctgtaaagcggcggtgcacaatcttctcgcgcaacgcgtcagtgggctgatcattaactatccgctggatgaccaggatgccattgctgtggaagctgcctgcactaatgttccggcgttatttcttgatgtctctgaccagacacccatcaacagtattattttctcccatgaagacggtacgcgactgggcgtggagcatctggtcgcattgggtcaccagcaaatcgcgctgttagcgggcccattaagttctgtctcggcgcgtctgcgtctggctggctggcataaatatctcactcgcaatcaaattcagccgatagcggaacgggaaggcgactggagtgccatgtccggttttcaacaaaccatgcaaatgctgaatgagggcatcgttcccactgcgatgctggttgccaacgatcagatggcgctgggcgcaatgcgcgccattaccgagtccgggctgcgcgttggtgcggatatctcggtagtgggatacgacgataccgaagacagctcatgttatatcccgccgtcaaccaccatcaaacaggattttcgcctgctggggcaaaccagcgtggaccgcttgctgcaactctctcagggccaggcggtgaagggcaatcagctgttgcccgtctcactggtgaaaagaaaaaccaccctggcgcccaatacgcaaaccgcctctccccgcgcgttggccgattcattaatgcagctggcacgacaggtttcccgactggaaagcgggcagtgagcgcaacgcaattaatgtgagttagcgcgaattgatctggtttgacagcttatcatcgactgcacggtgcaccaatgcttctggcgtcaggcagccatcggaagctgtggtatggctgtgcaggtcgtaaatcactgcataattcgtgtcgctcaaggcgcactcccgttctggataatgttttttgcgccgacatcataacggttctggcaaatattctgaaatgagctgttgacaattaatcatccggctcgtataatgtgtggaattgtgagcggataacaatttcacacaggaaacagcgccgctgagaaaaagcgaagcggcactgctctttaacaatttatcagacaatctgtgtgggcactcgaccggaattatcgattaactttattattaaaaattaaagaggtatatattaatgtatcgattaaataaggaggaataaaccatggccggtacgggtcgtttggctggtaaaattgcattgatcaccggtggtgctggtaacattggttccgagctgacccgccgttttctggccgagggtgcgacggttattatcagcggccgtaaccgtgcgaagctgaccgcgctggccgagcgcatgcaagccgaggccggcgtgccggccaagcgcattgatttggaggtgatggatggttccgaccctgtggctgtccgtgccggtatcgaggcaatcgtcgctcgccacggtcagattgacattctggttaacaacgcgggctccgccggtgcccaacgtcgcttggcggaaattccgctgacggaggcagaattgggtccgggtgcggaggagactttgcacgcttcgatcgcgaatctgttgggcatgggttggcacctgatgcgtattgcggctccgcacatgccagttggctccgcagttatcaacgtttcgactattttctcgcgcgcagagtactatggtcgcattccgtacgttaccccgaaggcagcgctgaacgctttgtcccagctggctgcccgcgagctgggcgctcgtggcatccgcgttaacactattttcccaggtcctattgagtccgaccgcatccgtaccgtgtttcaacgtatggatcaactgaagggtcgcccggagggcgacaccgcccatcactttttgaacaccatgcgcctgtgccgcgcaaacgaccaaggcgctttggaacgccgctttccgtccgttggcgatgttgctgatgcggctgtgtttctggcttctgctgagagcgcggcactgtcgggtgagacgattgaggtcacccacggtatggaactgccggcgtgtagcgaaacctccttgttggcgcgtaccgatctgcgtaccatcgacgcgagcggtcgcactaccctgatttgcgctggcgatcaaattgaagaagttatggccctgacgggcatgctgcgtacgtgcggtagcgaagtgattatcggcttccgttctgcggctgccctggcgcaatttgagcaggcagtgaatgaatctcgccgtctggcaggtgcggatttcaccccgccgatcgctttgccgttggacccacgtgacccggccaccattgatgcggttttcgattggggcgcaggcgagaatacgggtggcatccatgcggcggtcattctgccggcaacctcccacgaaccggctccgtgcgtgattgaagtcgatgacgaacgcgtcctgaatttcctggccgatgaaattaccggcaccatcgttattgcgagccgtttggcgcgctattggcaatcccaacgcctgaccccgggtgcccgtgcccgcggtccgcgtgttatctttctgagcaacggtgccgatcaaaatggtaatgtttacggtcgtattcaatctgcggcgatcggtcaattgattcgcgtttggcgtcacgaggcggagttggactatcaacgtgcatccgccgcaggcgatcacgttctgccgccggtttgggcgaaccagattgtccgtttcgctaaccgctccctggaaggtctggagttcgcgtgcgcgtggaccgcacagctgctgcacagccaacgtcatattaacgaaattacgctgaacattccagccaatattagcgcgaccacgggcgcacgttccgccagcgtcggctgggccgagtccttgattggtctgcacctgggcaaggtggctctgattaccggtggttcggcgggcatcggtggtcaaatcggtcgtctgctggccttgtctggcgcgcgtgtgatgctggccgctcgcgatcgccataaattggaacagatgcaagccatgattcaaagcgaattggcggaggttggttataccgatgtggaggaccgtgtgcacatcgctccgggttgcgatgtgagcagcgaggcgcagctggcagatctggtggaacgtacgctgtccgcattcggtaccgtggattatttgattaataacgccggtattgcgggcgtggaggagatggtgatcgacatgccggtggaaggctggcgtcacaccctgtttgccaacctgatttcgaattattcgctgatgcgcaagttggcgccgctgatgaagaagcaaggtagcggttacatcctgaacgtttcttcctattttggcggtgagaaggacgcggcgattccttatccgaaccgcgccgactacgccgtctccaaggctggccaacgcgcgatggcggaagtgttcgctcgtttcctgggtccagagattcagatcaatgctattgccccaggtccggttgaaggcgaccgcctgcgtggtaccggtgagcgtccgggcctgtttgctcgtcgcgcccgtctgatcttggagaataaacgcctgaacgaattgcacgcggctttgattgctgcggcccgcaccgatgagcgctcgatgcacgagttggttgaattgttgctgccgaacgacgtggccgcgttggagcagaacccagcggcccctaccgcgctgcgtgagctggcacgccgcttccgtagcgaaggtgatccggcggcaagctcctcgtccgccttgctgaatcgctccatcgctgccaagctgttggctcgcttgcataacggtggctatgtgctgccggcggatatttttgcaaatctgcctaatccgccggacccgttctttacccgtgcgcaaattgaccgcgaagctcgcaaggtgcgtgatggtattatgggtatgctgtatctgcagcgtatgccaaccgagtttgacgtcgctatggcaaccgtgtactatctggccgatcgtaacgtgagcggcgaaactttccatccgtctggtggtttgcgctacgagcgtaccccgaccggtggcgagctgttcggcctgccatcgccggaacgtctggcggagctggttggtagcacggtgtacctgatcggtgaacacctgaccgagcacctgaacctgctggctcgtgcctatttggagcgctacggtgcccgtcaagtggtgatgattgttgagacggaaaccggtgcggaaaccatgcgtcgtctgttgcatgatcacgtcgaggcaggtcgcctgatgactattgtggcaggtgatcagattgaggcagcgattgaccaagcgatcacgcgctatggccgtccgggtccggtggtgtgcactccattccgtccactgccaaccgttccgctggtcggtcgtaaagactccgattggagcaccgttttgagcgaggcggaatttgcggaactgtgtgagcatcagctgacccaccatttccgtgttgctcgtaagatcgccttgtcggatggcgcgtcgctggcgttggttaccccggaaacgactgcgactagcaccacggagcaatttgctctggcgaacttcatcaagaccaccctgcacgcgttcaccgcgaccatcggtgttgagtcggagcgcaccgcgcaacgtattctgattaaccaggttgatctgacgcgccgcgcccgtgcggaagagccgcgtgacccgcacgagcgtcagcaggaattggaacgcttcattgaagccgttctgctggttaccgctccgctgcctcctgaggcagacacgcgctacgcaggccgtattcaccgcggtcgtgcgattaccgtctaatagaagcttggctgttttggcggatgagagaagattttcagcctgatacagattaaatcagaacgcagaagcggtctgataaaacagaatttgcctggcggcagtagcgcggtggtcccacctgaccccatgccgaactcagaagtgaaacgccgtagcgccgatggtagtgtggggtctccccatgcgagagtagggaactgccaggcatcaaataaaacgaaaggctcagtcgaaagactgggcctttcgttttatctgttgtttgtcggtgaacgctctcctgagtaggacaaatccgccgggagcggatttgaacgttgcgaagcaacggcccggagggtggcgggcaggacgcccgccataaactgccaggcatcaaattaagcagaaggccatcctgacggatggcctttttgcgtttctacaaactctttttgtttatttttctaaatacattcaaatatgtatccgctcatgagacaataaccctgataaatgcttcaataatattgaaaaaggaagagtatgagtattcaacatttccgtgtcgcccttattcccttttttgcggcattttgccttcctgtttttgctcacccagaaacgctggtgaaagtaaaagatgctgaagatcagttgggtgcacgagtgggttacatcgaactggatctcaacagcggtaagatccttgagagttttcgccccgaagaacgttttccaatgatgagcacttttaaagttctgctatgtggcgcggtattatcccgtgttgacgccgggcaagagcaactcggtcgccgcatacactattctcagaatgacttggttgagtactcaccagtcacagaaaagcatcttacggatggcatgacagtaagagaattatgcagtgctgccataaccatgagtgataacactgcggccaacttacttctgacaacgatcggaggaccgaaggagctaaccgcttttttgcacaacatgggggatcatgtaactcgccttgatcgttgggaaccggagctgaatgaagccataccaaacgacgagcgtgacaccacgatgcctgtagcaatggcaacaacgttgcgcaaactattaactggcgaactacttactctagcttcccggcaacaattaatagactggatggaggcggataaagttgcaggaccacttctgcgctcggcccttccggctggctggtttattgctgataaatctggagccggtgagcgtgggtctcgcggtatcattgcagcactggggccagatggtaagccctcccgtatcgtagttatctacacgacgg

SEQ ID NO: 175 - DNA, 11352 bp, Artificial Sequence
  Description of Artificial Sequence: Synthetic pACYC-Ptal-pntAB-Ptpia-accAD-PrpiA-accCD-Pkan-ccdAB polynucleotide
gaattccggatgagcattcatcaggcgggcaagaatgtgaataaaggccggataaaacttgtgcttatttttctttacggtctttaaaaaggccgtaatatccagctgaacggtctggttataggtacattgagcaactgactgaaatgcctcaaaatgttctttacgatgccattgggatatatcaacggtggtatatccagtgatttttttctccattttagcttccttagctcctgaaaatctcgataactcaaaaaatacgcccggtagtgatcttatttcattatggtgaaagttggaacctcttacgtgccgatcaacgtctcattttcgccaaaagttggcccagggcttcccggtatcaacagggacaccaggatttatttattctgcgaagtgatcttccgtcacaggtatttattcggcgcaaagtgcgtcgggtgatgctgccaacttactgatttagtgtatgatggtgtttttgaggtgctccagtggcttctgtttctatcagctgtccctcctgttcagctactgacggggtggtgcgtaacggcaaaagcaccgccggacatcagcgctagcggagtgtatactggcttactatgttggcactgatgagggtgtcagtgaagtgcttcatgtggcaggagaaaaaaggctgcaccggtgcgtcagcagaatatgtgatacaggatatattccgcttcctcgctcactgactcgctacgctcggtcgttcgactgcggcgagcggaaatggcttacgaacggggcggagatttcctggaagatgccaggaagatacttaacagggaagtgagagggccgcggcaaagccgtttttccataggctccgcccccctgacaagcatcacgaaatctgacgctcaaatcagtggtggcgaaacccgacaggactataaagataccaggcgtttccccctggcggctccctcgtgcgctctcctgttcctgcctttcggtttaccggtgtcattccgctgttatggccgcgtttgtctcattccacgcctgacactcagttccgggtaggcagttcgctccaagctggactgtatgcacgaaccccccgttcagtccgaccgctgcgccttatccggtaactatcgtcttgagtccaacccggaaagacatgcaaaagcaccactggcagcagccactggtaattgatttagaggagttagtcttgaagtcatgcgccggttaaggctaaactgaaaggacaagttttggtgactgcgctcctccaagccagttacctcggttcaaagagttggtagctcagagaaccttcgaaaaaccgccctgcaaggcggttttttcgttttcagagcaagagattacgcgcagaccaaaacgatctcaagaagatcatcttattaatcagataaaatatttctagatttcagtgcaatttatctcttcaaatgtagcacctgaagtcagccccatacgatataagttgtaattctcatgtttgacagcttatcatcgataagctttaatgcggtagtttatcacagttaaattgctaacgcagtcaggcaccgtgtatgaaatctaacaatgcgctcatcgtcatcctcggcaccgtcaccctggatgctgtaggcataggcttggttatgccggtactgccgggcctcttgcgggatttaagctcgggccccctgggcggttctgataacgagtaatcgttaatccgcaaataacgtaaaaacccgcttcggcgggtttttttatggggggagtttagggaaagagcatttgtcagaatatttaagggcgcctgtcactttgcttgatatatgagaattatttaaccttataaatgagaaaaaagcaacgcactttaaataagatacgttgctttttcgattgatgaacacctataattaaactattcatctattatttatgattttttgtatatacaatatttctagtttgttaaagagaattaagaaaataaatctcgaaaataataaagggaaaatcagtttttgatgggttacagagctttcaggattgcatccacgctggctttggcgtcaccaaacagcatgtgggtgttttccttgaagaacagcgggttttgcacaccagcatagccagtgttcatcgaacgtttaaagacaatcacgttctgcgctttccacacttccagcacaggcataccagcaatcggactcttcggatcatcctgcgccgccgggttaaccgtatcgttagcaccaatcaccagtacggtatcggtatcagcaaagtcatcattgatctcgtccatttccagcacgatgtcatacggtacttttgcttcagccagcaatacgttcatatgtccaggcaaacgccccgcgaccgggtggataccgaaacgcacattaataccacgagcgcgcaatttctcagtaatttcagcgacaggatattgcgcctgcgcgactgccatgccgtaccccggagtaatgatcactgaatgggagtttttcagcagttccgctgtctcttctgcggtgatttcgcggtgctcacccacttcctgatcatcgccagtagaagagccgtcggtgccgaaaccacccgcaataacgctgataaaggaacggttcatcgcctcacacataatgtaagaaaggatagcccccgaagaaccgaccagcgcaccggtcacaatcagcaggtcgttgctgagcataaagcccgcagccgcagccgcccagccggagtacgagttcagcatcgacaccaccactggcatatctgcaccaccgatggaggcgactaaatgccagccgaataccagcgcaattgcggtcattatcagcaatgccagcacttgcaggccgacgctgtccgtgcgaacaaatacaatcagcagcaggaaggaaacgaccagagccgccaggttcattttgtgacggtttggcagcatcaatggtttagacgaaatcttgccacacagtttgccgaacgccaccaccgaacccgtgaacgttaccgccccgatgaagataccgaggaacacttccgtcaggtgaatattgaccagaatcggtgccattcccgcgtcatgatgcagatagctgttaaagccaaccagcactgccgccagacccacgaagctatgcaggatcgccaccagttctggcatttcggtcatttcaactttcttcgccagacggataccaattgccccaccaatgaccatcgccagcaagatccagccaacattacccgtatccggtccaaaaatggttgcgattaacgcaatcgccatcccggcgataccgaagttgttaccctggcgagacgtttcatgtttcgaaagaccggccagactgaagataaacaggatcgcggcaacaatgtatgcagctgtaactaatcctccagacatatgttaccccttaatttttgcggaacattttcagcatgcgctgagtcacggtgaagccaccgaaaatattaatgctggctataagcaccgcgataaaactaaggaagctaacccagccgccctggccaatctgcaacagtgctccgacaacaataatccctgaaatcgcgttggtgaccgacatcaacggtgtatgcagcgcgtgcgatacattccacaccacgtaataaccgacaacgcaggccagcgcgaaaacggtgaagtgcccaaggaattctttcggcgcaacgcttgccatccagccaaaaagaatgattgccagcgccatcaacgcgtatttacgccacggtgagcaggtacatttttcctcagttttcacttccggtgccgctttttgtgccgcctgcggctgagctgatacctgaatcggcggtgccggccaggtaatttcgcccgcacggatcacggtcacgccgcgaatcaccacatcatcaaaatcaacagtgatattgccgtctttctctttgcacaacagtttcagcagattaacgaggtttgtgccgtaaagctgtgaggattgcgtcggcagacggcccggaagatcggtataaccaatcactttgacaccattttccgtagtgaagatttcacccggcacggtgtattcacagttgccgccgttttgggctgccaggtcgacaatcacactgcccgccttcatggagtcaaccatttcacgggtaattagcttcggcgctggtttgcctggaataagcgcggtggtgacaatgatatcgacctcttttgcctgggcggcaaagagttccatttccgctttgatgaacgcgtccgacatcactttggcatagccatcgccgctgccagcttcctctttaaaatccagctcgaggaattccgcgcccatactttgaacttgttctttcacttccgggcgggtgtcgaatgcacgcacaatcgcgccgagactgtttgctgcgccaatggcggccagacctgcaacacccgcaccaatcaccatcacttttgccggtggcactttcccggccgcagtaatttgcccggtaaagaagcgcccaaattcatgtgccgcttcaacaatggcgcgataaccggcgatgttcgccatcgagcttagtgcgtccagcgattgtgcgcgtgagatacgcggcacagagtccatcgccatcacggtcacgttacgttccgcaagtttttgcattaattccggattctgcgcaggccagataaaactcaccagcgttgtcccaggattcagtaacgcaatttcatcatctaacggcgcattgaccttcagaatgatctctgactgccagacgctattcccttctacaatttcagcgcccgcttgcacaaacgctttatcgtcaaaacttgccagttgacccgcgccgctctctaccgcgacggtaaaacccagtttcagcagctgttccactgtttttggcgttgctgcaacacgggtttcattggttaaccgttctcttggtatgccaattgccatggtaaatactccttgaaaagtaaagtgttagatgagtgcgttaattcacacttctgagaaatttcgctaaacgcatcaaaaaagcatagcagacaggcatggtattgctggattaagcaggtaacatcagtgttataggattattaccaaaacattatattcacaggtgtatcgctcaatactgaccatttaaatcatacctgacctccatagcagaaagtcaaaagcctccgaccggaggcttttgacttgagggggatcagcttctattatttctcttgcaggcccagtttcttttccaggtagtgaatgttcgtaccgccgtgctggaaattctcgtcgttcataatgcggatctgcaaatccacattggtcttaatgccatcaatgatcagctcttgcagcgcgtttttcatgcgggcgatcgcgacatcacgattttcgccatagcagatcagtttaccaatcatgctgtcatagtacggcggcacggtgtaaccggcgtagatgtgagactcccaacgaacgccaaaaccacctggcgcgtgaaaacgcgtgatcttaccagggctcggcagaaaggtattcgggtcctccgcattgatacggcactcgaccgcgtgaccacgaacgtgcacctcttcttgcttgatcgacagcggctgaccagccgcaatgcgcagttgctctttgatcagatcaacgccagtaatcatctcggtcaccgggtgctcaacctggatgcgggtattcatttcaatgaagtaaaactcaccattttcgaacaggaactcaaacgtacccgcaccacggtaaccaatgtccacacacgctttcgcacagcgctcaccgatgtagcgacgcagttccggcgtaatacccggagccggtgcctcttccaccaccttctgatgacggcgttgcatggagcaatcacgttctgccaagtagatcgcattgccctgaccatccgccagaacttggatttcaacgtggcgcggattctccagatacttctccatatacaccatatcgttagagaacgccgctttggcttccgcacgggtcatgctgatgctttgcgccagttccgcatcaccacggacgacacgcataccacggccaccgccaccaccagaggctttgataatgaccgggtagccaatacgtttagcgatggcacggttcttgtccatatcgtcacccagcggaccatcgctgcccggaacacacggcacaccggcctttttcatcgctgcaatggcgctcactttgtcgcccatcaggcgaatcgtctccgccttagggccaatgaagatgaaaccgctacgctccacttgttcagcaaagttagcgttctcgctcaggaaaccgtagcccggatgaatcgccactgcaccggtgatctctgccgcagagatgatggccgggatgttcagatagcttttcacgctcggtgccggaccgatgcaaaccgtttcgtcggccagcagaacatgcttcaggtcgcggtctgcgctggaatgcacggcaacagtcttaatgcccagctctttacacgcgcgcaagatacgcagcgcgatttcaccgcggtttgcaatcacgatcttgtccaacatgttcgcctcgttactcgatcacaaccagcggttcatcgaactcaacaggctggccggattccaccaggatcgctttaacagtaccgctcttatccgcttcaatctggttcatcattttcattgcctcaacgatacacagcgtgtcgccgacattgaccttctggccgacttcgatgaaggcttttgcgtccggcgacggcgtgcgatagaaggtgcccaccatcgggctacgcacgatatgacccgaaatctcggccgctgccggtgcctccatgcttggaacggtcgccggtgcagcggcgttgctctgtgccggctgttgcatcatcggagcggcgtatgcttgctgcataaccggaaagctcgctgccggtgccgcacgggaaatacggacgctctcttcaccttcgctgatctccagctcgctgatgccgctttcttcaaccagttcaatcagtttcttgatcttacgaatgtccatggtttttcctccttcgcctgtggtatgaaatttcacacgcattatatacaaaaaaagcgattcagaccccgttggcaagccgcgtggttaactccacgtgctattatgcctccggctcttggtccgggaccggcggaaccacgacaccctcacgcggtgcttcaggattcggagccggcagattcatcaatttcgccagaatgctcgccagtttcagacgcatttctggacggcgaacgatcatgtcgatggcacctttctcaatcaggaactcgctgcgctggaaaccaggcggcaacttttcgcgaaccgtctgttcaataacacgcggaccagcaaaaccaatcagagccttcggctctgcgatgttcaaatcacccagcatcgcaaagctggcgctgacaccgcccatcgtagggtcggtcaggacggaaatgtacggcaggccgcgttcttgcatcttcgccagggctgccgaggtttttgccatctgcatcaggctcatcagggcctcttgcatacgcgcaccaccgctcgcgctgaaacaaatcagaggacagttatcctccagcgcctgctccacggcacgcacaaagcgtgcgcccaccacggaacccatgctgccacccataaacgcaaactcgaacgccgcagcaacaaccggcataccatacagggtgcctttcataacaaccagtgcgtccttctcaccggtttctttttgtgcagatgccaaacgatccttatacttcttggaatcacggaatttcagaacatctttcggttccagttcgctacccagctcgaccaggctgccctcatccagcaggctatgcagacgattacgagcggtcatacgcatgtgatggtcgcatttcgggcacacttccaggttacgctccagctccgcacgatacaaaacctgaccgcagctatcgcatttggtccagacgccttcagggatgctcgccttgcgggtcggggtgatattggacttaatgcgttcaatccagctcatgattttcctcctttactacgcgtagccatagctcatcaagcgctgatagcgacggtttttcagatcctccgtgctcagcacgtccagatccgccaggtccgccagcagctgggccttcaggctggctgccatcgcctccggattacggtgagcaccgcccagcggttccgggatgatagaatcaatcaacttcagttctttcagacgcggtgcgatgatacccatcgcttccgctgccaatggtgctttatccgcgctcttccacagaatggaagcgcaaccttccgggctaatgacgctgtacgtgctgtattgcagcatgttgaccttatcaccgacaccgatcgccaacgcaccaccgctaccgccctcgccaatcacggtgcaaacgaccggcacacccagacgagacatctcacgcaggttacgtgcgatggcctcgctctgaccacgctcttccgcaccaacgcctgggtacgcacccggcgtatcaatgaacgtgataatcggcatcttaaagcgttcggccatttgcatcagacgcagggccttgcggtagccctccggtgccggcataccaaagttacgacgaatcttttctttcgtctcgcggcctttttgatggccgataatcatcaccggacggccatccaaacgagcaataccgccgacaattgctttatcgtccgcataggcgcggtcgcctgccagttcgtcgaactcgtcaaacgccaggcgcacgtagtccagggtatatgggcgttgtgggtggcgagccaactgggcaatctgccatgcgcccaaatcagcaaagattttgcgagtcagttcaacagacttctcacgcaaacggtggacctcttcgtcgatgttaatgtccagtttctcatcttgacggctaaccgcggtcaggctgtcaatcttcgcttccagttctgcaatcggctgctcgaagtccaggaagttcagggacatgtttttcctcctgccccgcgcttataagcgaataaaggaagatggccgccccgcagggcagcaggtctgtgaaacagtatagagattcatcggcacaaaggctttgctttttgtcatttattcaaaccggcgcctcgaaccggctccgggcattgccctggccggcactttgcatggggagatgcggatctcgggcagcgttgggtcctggccacgggtgcgcatgatcgtgctcctgtcgttgaggacccggctaggctggcggggttgccttactggttagcagaatgaatcaccgatacgcgagcgaacgtgaagcgactgctgctgcaaaacgtctgcgacctgagcaacaacatgaatggtcttcggtttccgtgtttcgtaaagtctggaaacgcggaagtcccctacgtgctgctgaagttgcccgcaacagagagtggaaccaaccggtgataccacgatactatgactgagagtcaacgccatgagcggcctcatttcttattctgagttacaacagtccgcaccgctgtccggtagctccttccggtgggcgcggggcatgactaggtcaggtatgatttaaatggtcagtattgagcgatatctagagaattcgtctaggatccttatattccccagaacatcaggttaatggcgtttttgatgtcattttcgcggtggctgagatcagccacttcttccccgataacggagaccggcacactggccatatcggtggtcatcatgcgccagctttcatccccgatatgcaccaccgggtaaagttcacgggagactttatctgacagcagacgtgcactggccagggggatcaccatccgtcgcccgggcgtgtcaataatatcactctgtacatccacaaacagacgataacggctctctcttttataggtgtaaaccttaaactgcatttcaccagtccctgttctcgtcagcaaaagagccgttcatttcaataaaccgggcgacctcagccatcccttcctgattttccgctttccagcgttcggcacgcagacgacgggcttcattctgcatggttgtgcttaccagaccggagatattgacatcatatgccttgagcaactgatagctgtcgctgtcaactgtcactgtaatacgctgcttcatgcgaaacgatcctcatcctgtctcttgatcagagcttgatcccctgcgccatcagatccttggcggcgagaaagccatccagtttactttgcagggcttcccaaccttaccagagggcgccccagctggcaattccggaagcttgatatcattcaggacgagcctcagactccagcgtaactggactgtcgtcgccgcacttatgactgtcttctttatcatgcaactcgtaggacaggtgccggcagcgcccaacagtcccccggccacggggcctgccaccatacccacgccgaaacaagcgccctgcaccattatgttccggatctgcatcgcaggatgctgctggctaccctgtggaacacctacatctgtattaacgaagcgctaaccgtttttatcaggctctgggaggcagaataaatgatcatatcgtcaattattacctccacggggagagcctgagcaaactggcctcaggcatttgagaagcacacggtcacactgcttccggtagtcaataaaccggtaaaccagcaatagacataagcggctatttaacgaccctgccctgaaccgacgaccgggtcgaatttgctttcgaatttctgccattcatccgcttattatcacttattcaggcgtagcaccaggcgtttaagggcaccaataactgccttaaaaaaattacgccccgccctgccactcatcgcagtactgttgtaattcattaagcattctgccgacatggaagccatcacagacggcatgatgaacctgaatcgccagcggcatcagcaccttgtcgccttgcgtataatatttgcccatggtgaaaacgggggcgaagaagttgtccatattggccacgtttaaatcaaaactggtgaaactcacccagggattggctgagacgaaaaacatattctcaataaaccctttagggaaataggccaggttttcaccgtaacacgccacatcttgcgaatatatgtgtagaaactgccggaaatcgtcgtggtattcactccagagcgatgaaaacgtttcagtttgctcatggaaaacggtgtaacaagggtgaacactatcccatatcaccagctcaccgtctttcattgccatacg

SEQ ID NO: 176 - DNA, 1245 bp, Artificial Sequence
  Description of Artificial Sequence: Synthetic cscB polynucleotide
atggccctgaacatcccattccgcaacgcatactaccgcttcgcaagcagctacagcttcctgttcttcatttcctggagcttgtggtggtcgctgtatgctatctggctgaaaggtcatctgggcttgacgggtacggaactgggtaccctgtattccgttaatcaatttacgtccatcctgtttatgatgttttacggcatcgtgcaggataagctgggcctgaagaaaccgctgatctggtgtatgagcttcatcctggttctgaccggtccgtttatgatttacgtgtacgaaccgctgctgcagtccaactttagcgtgggcctgatcctgggtgcgttgtttttcggcttgggttacctggccggttgtggtctgctggatagctttacggaaaagatggcgcgtaactttcactttgaatatggtaccgcgcgtgcgtggggttcgttcggctacgctatcggcgcgttcttcgccggcattttcttcagcattagcccgcacatcaatttctggctggttagcctgttcggtgcggtctttatgatgatcaacatgcgttttaaggacaaggatcaccagtgtattgcagcggatgctggtggtgttaagaaagaggactttattgcagttttcaaagatcgcaacttctgggtgttcgtgatcttcattgtcggtacctggtccttttacaatatcttcgatcagcaactgtttccggttttctatgcgggcctgttcgaaagccacgatgttggcacgcgtctgtacggttatctgaatagctttcaagtcgtcctggaagctctgtgtatggcgatcattccgttctttgttaaccgtgtaggcccgaaaaatgcgttgctgattggcgttgtgattatggcactgcgtatcctgagctgcgcactgtttgtgaatccgtggatcattagcctggtgaaactgctgcacgctattgaagtcccgctgtgtgtcatctctgttttcaagtattccgtcgcgaacttcgacaagcgtttgtccagcaccatcttcctgatcggtttccaaattgcaagcagcctgggtattgttctgttgagcacgccgactggtattttgtttgatcacgctggttatcagactgtgttctttgcgatctcgggtatcgtttgcttgatgctgctgttcggtatctttttcctgtctaagaaacgcgagcaaattgttatggaaaccccggttcctagcgcgatc

SEQ ID NO: 177 - DNA, 1431 bp, Artificial Sequence
  Description of Artificial Sequence: Synthetic cscA polynucleotide
atgactcaatcccgcctgcacgcagcacaaaacgcactggcaaagctgcatgagcgtcgtggtaacaccttctacccacacttccacctggcgccacctgcgggttggatgaacgatccgaacggcctgatttggttcaacgaccgttaccatgcgttctatcaacaccaccctatgtccgagcattggggtccgatgcattggggccacgctaccagcgatgacatgatccattggcagcacgagccgattgccctggcaccgggtgatgagaacgacaaggatggttgcttcagcggttctgctgtcgatgataacggtgtcctgtctctgatctacaccggtcatgtctggctggatggcgctggcaatgacgacgcaatccgtgaagttcaatgcctggcgacctcgcgtgacggcattcacttcgagaaacagggcgtcattttgacgccgcctgagggtatcatgcactttcgcgacccaaaagtttggcgtgaagcggacacgtggtggatggtcgtcggcgcgaaagacccgggtaacacgggtcagattctgctgtatcgtggcagcagcctgcgtgagtggaccttcgaccgcgtcctggcccatgctgatgcgggcgagagctatatgtgggaatgcccagacttcttttctctgggcgaccaacattatctgatgttcagcccgcaaggcatgaatgcggagggctacagctaccgtaaccgctttcagagcggcgttatcccgggtatgtggagcccaggtcgcctgtttgctcagtccggtcattttaccgagctggacaatggtcacgatttctatgcaccgcaatcgttcgtggcgaaagatggccgtcgcatcgttattggttggatggatatgtgggaaagcccgatgccgagcaagcgtgagggttgggcgggttgcatgaccctggcccgtgagctgagcgagagcaatggcaaattgctgcaacgcccggtgcacgaggcagaaagcctgcgccagcaacaccaaagcatcagccctcgtaccattagcaacaaatacgttctgcaggaaaatgcgcaggccgttgagattcaactgcaatgggccctgaaaaacagcgacgcggagcattacggcctgcagctgggtgcgggcatgcgtttgtacattgataatcaaagcgagcgtttggttttgtggcgctactacccgcatgagaacctggacggctaccgtagcatcccgctgccgcagggtgacatgctggcgctgcgtattttcattgatactagcagcgtcgaggtattcatcaatgacggcgaagccgtgatgtctagccgtatttacccgcagccggaggaacgcgagctgagcttgtatgccagccacggtgtcgcggtgctgcaacacggtgcactgtggcaactgggt

SEQ ID NO: 178 - DNA, 921 bp, Artificial Sequence
  Description of Artificial Sequence: Synthetic cscK polynucleotide
atgtcagcgaaagtatgggtcctgggcgacgcagtagtagatctgttgccggaaagcgacggtcgtctgctgccgtgtccgggtggtgcaccggctaatgttgcggtgggcatcgcgcgtctgggtggtacctcgggttttatcggtcgcgtgggtgacgaccctttcggtgcgctgatgcagcgcactttgctgaccgagggtgtggatatcacgtatctgaagcaggatgagtggcatcgtacctctaccgtcctggtggacctgaatgaccagggtgaacgtagcttcaccttcatggtgcgcccgagcgccgatttgtttctggaaacgaccgatctgccgtgttggcgtcacggcgagtggctgcacttgtgtagcattgcactgtctgcggaaccgtcgcgcacgagcgccttcaccgcgatgacggcaatccgccatgcaggtggctttgtctccttcgacccgaacattcgtgaggatctgtggcaggacgagcacctgttgcgcctgtgcctgcgtcaagcactgcagttggccgacgttgtaaaactgtccgaagaagagtggcgtctgatctctggtaaaacgcagaatgaccgcgatatttgtgcgctggctaaagagtatgagatcgccatgttgctggtgacgaagggtgccgaaggtgttgttgtgtgctatcgtggtcaggtgcaccattttgcaggcatgtccgtgaattgcgtggattctacgggcgcaggcgatgcgttcgtcgcgggtctgttgaccggtctgagcagcaccggcctgtcgaccgatgaacgtgaaatgcgtcgtatcattgacctggcgcagcgttgcggtgccttggcggttaccgcaaagggtgccatgaccgcattgccgtgccgtcaggagctggaaagcgagaaa

SEQ ID NO: 179 - DNA, 4500 bp, Artificial Sequence
  Description of Artificial Sequence: Synthetic delta-adhE:cscBAK  polynucleotide
gaagcaaaagccggataatgttagccataaataaggttgaaaagacgcgctgacaatacgccttttgacagcatttttcacctcctaactacttaaaattgctatcattcgttattgttatctagttgtgcaaaacattgacatccctatcagtgatagatataatgagcacatgcccaccggcagctgccggtgggccgtattttggatgataacaggaggcaaaaccatggccctgaacatcccattccgcaacgcatactaccgcttcgcaagcagctacagcttcctgttcttcatttcctggagcttgtggtggtcgctgtatgctatctggctgaaaggtcatctgggcttgacgggtacggaactgggtaccctgtattccgttaatcaatttacgtccatcctgtttatgatgttttacggcatcgtgcaggataagctgggcctgaagaaaccgctgatctggtgtatgagcttcatcctggttctgaccggtccgtttatgatttacgtgtacgaaccgctgctgcagtccaactttagcgtgggcctgatcctgggtgcgttgtttttcggcttgggttacctggccggttgtggtctgctggatagctttacggaaaagatggcgcgtaactttcactttgaatatggtaccgcgcgtgcgtggggttcgttcggctacgctatcggcgcgttcttcgccggcattttcttcagcattagcccgcacatcaatttctggctggttagcctgttcggtgcggtctttatgatgatcaacatgcgttttaaggacaaggatcaccagtgtattgcagcggatgctggtggtgttaagaaagaggactttattgcagttttcaaagatcgcaacttctgggtgttcgtgatcttcattgtcggtacctggtccttttacaatatcttcgatcagcaactgtttccggttttctatgcgggcctgttcgaaagccacgatgttggcacgcgtctgtacggttatctgaatagctttcaagtcgtcctggaagctctgtgtatggcgatcattccgttctttgttaaccgtgtaggcccgaaaaatgcgttgctgattggcgttgtgattatggcactgcgtatcctgagctgcgcactgtttgtgaatccgtggatcattagcctggtgaaactgctgcacgctattgaagtcccgctgtgtgtcatctctgttttcaagtattccgtcgcgaacttcgacaagcgtttgtccagcaccatcttcctgatcggtttccaaattgcaagcagcctgggtattgttctgttgagcacgccgactggtattttgtttgatcacgctggttatcagactgtgttctttgcgatctcgggtatcgtttgcttgatgctgctgttcggtatctttttcctgtctaagaaacgcgagcaaattgttatggaaaccccggttcctagcgcgatctaaggaggtaatacacatgtcagcgaaagtatgggtcctgggcgacgcagtagtagatctgttgccggaaagcgacggtcgtctgctgccgtgtccgggtggtgcaccggctaatgttgcggtgggcatcgcgcgtctgggtggtacctcgggttttatcggtcgcgtgggtgacgaccctttcggtgcgctgatgcagcgcactttgctgaccgagggtgtggatatcacgtatctgaagcaggatgagtggcatcgtacctctaccgtcctggtggacctgaatgaccagggtgaacgtagcttcaccttcatggtgcgcccgagcgccgatttgtttctggaaacgaccgatctgccgtgttggcgtcacggcgagtggctgcacttgtgtagcattgcactgtctgcggaaccgtcgcgcacgagcgccttcaccgcgatgacggcaatccgccatgcaggtggctttgtctccttcgacccgaacattcgtgaggatctgtggcaggacgagcacctgttgcgcctgtgcctgcgtcaagcactgcagttggccgacgttgtaaaactgtccgaagaagagtggcgtctgatctctggtaaaacgcagaatgaccgcgatatttgtgcgctggctaaagagtatgagatcgccatgttgctggtgacgaagggtgccgaaggtgttgttgtgtgctatcgtggtcaggtgcaccattttgcaggcatgtccgtgaattgcgtggattctacgggcgcaggcgatgcgttcgtcgcgggtctgttgaccggtctgagcagcaccggcctgtcgaccgatgaacgtgaaatgcgtcgtatcattgacctggcgcagcgttgcggtgccttggcggttaccgcaaagggtgccatgaccgcattgccgtgccgtcaggagctggaaagcgagaaataaggaggtaatactcatgactcaatcccgcctgcacgcagcacaaaacgcactggcaaagctgcatgagcgtcgtggtaacaccttctacccacacttccacctggcgccacctgcgggttggatgaacgatccgaacggcctgatttggttcaacgaccgttaccatgcgttctatcaacaccaccctatgtccgagcattggggtccgatgcattggggccacgctaccagcgatgacatgatccattggcagcacgagccgattgccctggcaccgggtgatgagaacgacaaggatggttgcttcagcggttctgctgtcgatgataacggtgtcctgtctctgatctacaccggtcatgtctggctggatggcgctggcaatgacgacgcaatccgtgaagttcaatgcctggcgacctcgcgtgacggcattcacttcgagaaacagggcgtcattttgacgccgcctgagggtatcatgcactttcgcgacccaaaagtttggcgtgaagcggacacgtggtggatggtcgtcggcgcgaaagacccgggtaacacgggtcagattctgctgtatcgtggcagcagcctgcgtgagtggaccttcgaccgcgtcctggcccatgctgatgcgggcgagagctatatgtgggaatgcccagacttcttttctctgggcgaccaacattatctgatgttcagcccgcaaggcatgaatgcggagggctacagctaccgtaaccgctttcagagcggcgttatcccgggtatgtggagcccaggtcgcctgtttgctcagtccggtcattttaccgagctggacaatggtcacgatttctatgcaccgcaatcgttcgtggcgaaagatggccgtcgcatcgttattggttggatggatatgtgggaaagcccgatgccgagcaagcgtgagggttgggcgggttgcatgaccctggcccgtgagctgagcgagagcaatggcaaattgctgcaacgcccggtgcacgaggcagaaagcctgcgccagcaacaccaaagcatcagccctcgtaccattagcaacaaatacgttctgcaggaaaatgcgcaggccgttgagattcaactgcaatgggccctgaaaaacagcgacgcggagcattacggcctgcagctgggtgcgggcatgcgtttgtacattgataatcaaagcgagcgtttggttttgtggcgctactacccgcatgagaacctggacggctaccgtagcatcccgctgccgcagggtgacatgctggcgctgcgtattttcattgatactagcagcgtcgaggtattcatcaatgacggcgaagccgtgatgtctagccgtatttacccgcagccggaggaacgcgagctgagcttgtatgccagccacggtgtcgcggtgctgcaacacggtgcactgtggcaactgggttaagcttcagtagcgctgtctggcaacataaacggccccttctgggcaatgccgatcagttaaggattagttgaccgatccttaaactgaggcactataacggcttccacaacagggagccgttttcttatgccacttctcaatgatctgctcgatttcagtgaccatccgcttatgcctccgccctctgcacaactatttgcagaacaccttcccaccgagtggatacaacactgcctgacgctttctgctcatgcgaccgttcgccgccgtcgtttaccgggggacatggttatctggatggtggtgcaatgagccaattaccgatgttgttcgccgtctgaacctgagcgcggatggcgaagcggggatgaacctgctggcccgcagcgctgtcacccaggcgcgtcagcgcgtgggggccgccccagtggaatggctcttccgccagaccgcacagacaggggcgcggaacgttacctgaaggatgactggcacggcctgcaactttttgccattgatggcgcacagttcaggacacctgataaacccgagctgcgtgaatattatgggtctgccaacacatccactaagcggcagaacgcctacccggttatgcgtctggtggccttaatgaacctg

SEQ ID NO: 180 - DNA, 1248 bp, Artificial Sequence
  Description of Artificial Sequence: Synthetic cscB(1A) polynucleotide
atggccctgaacatcccattccgcaacgcatactaccgcttcgcaagcagctacagcttcctgttcttcatttcctggagcttgtggtggtcgctgtatgctatctggctgaaaggtcatctgggcttgacgggtacggaactgggtaccctgtattccgttaatcaatttacgtccatcctgtttatgatgttttacggcatcgtgcaggataagctgggcctgaagaaaccgctgatctggtgtatgagcttcatcctggttctgaccggtccgtttatgatttacgtgtacgaaccgctgctgcagtccaactttagcgtgggcctgatcctgggtgcgttgtttttcggcttgggttacctggccggttgtggtctgctggatagctttacggaaaagatggcgcgtaactttcactttgaatatggtaccgcgcgtgcgtggggttcgttcggctacgctatcggcgcgttcttcgccggcattttcttcagcattagcccgcacatcaatttctggctggttagcctgttcggtgcggtctttatgatgatcaacatgcgttttaaggacaaggatcaccagtgtattgcagcggatgctggtggtgttaagaaagaggactttattgcagtcttcaaagatcgcaacttctgggtgttcgtgatcttcattgtcggtacctggtccttttacgatatcttcgatcagcaactgtttccggttttctatgcgggcctgttcgaaagccacgatgttggcacgcgtctgtacggttatctgaatagctttcaggtcgtcctggaagctctgtgtatggcgatcattccgttctttgttaaccgtgtaggcccgaaaaatgcgttgctgattggcgttgtgattatggcactgcgtatcctgagctgcgcactgtttgtgaatccgtgggtcattagcctggtgaaactgctgcacgctattgaagtcccgctgtgtgtcatctctgttttcaagtattccgtcgcgaacttcgacaagcgtttgtccagcaccatcttcctgatcggtttccaaattgcaagcagcctgggtattgttctgttgagcacgccgactggtgttttgtttgatcacgctggttatcagactgtgttctttgcgatctcgggtatcgtttgcttgatgctgctgttcggtatctttttcctgtctaagaaacgcgagcaaattgttatggaaaccccggttcctagcgcgatctaa

SEQ ID NO: 181 - DNA, 9045 bp, Artificial Sequence
  Description of Artificial Sequence: Synthetic pTRC-Ptrc-mcr-glk polynucleotide
ccttcaactcagcaaaagttcgatttattcaacaaagccacgttgtgtctcaaaatctctgatgttacattgcacaagataaaaatatatcatcatgaacaataaaactgtctgcttacataaacagtaatacaaggggtgttatgagccatattcaacgggaaacgtcttgctcgaggccgcgattaaattccaacatggatgctgatttatatgggtataaatgggctcgcgataatgtcgggcaatcaggtgcgacaatctatcgattgtatgggaagcccgatgcgccagagttgtttctgaaacatggcaaaggtagcgttgccaatgatgttacagatgagatggtcagactaaactggctgacggaatttatgcctcttccgaccatcaagcattttatccgtactcctgatgatgcatggttactcaccactgcgatccccgggaaaacagcattccaggtattagaagaatatcctgattcaggtgaaaatattgttgatgcgctggcagtgttcctgcgccggttgcattcgattcctgtttgtaattgtccttttaacagcgatcgcgtatttcgtctcgctcaggcgcaatcacgaatgaataacggtttggttgatgcgagtgattttgatgacgagcgtaatggctggcctgttgaacaagtctggaaagaaatgcataagcttttgccattctcaccggattcagtcgtcactcatggtgatttctcacttgataaccttatttttgacgaggggaaattaataggttgtattgatgttggacgagtcggaatcgcagaccgataccaggatcttgccatcctatggaactgcctcggtgagttttctccttcattacagaaacggctttttcaaaaatatggtattgataatcctgatatgaataaattgcagtttcatttgatgctcgatgagtttttctaatccggtatcattgcagcactggggccagatggtaagccctcccgtatcgtagttatctacacgacggggagtcaggcaactatggatgaacgaaatagacagatcgctgagataggtgcctcactgattaagcattggtaactgtcagaccaagtttactcatatatactttagattgatttaaaacttcatttttaatttaaaaggatctaggtgaagatcctttttgataatctcatgaccaaaatcccttaacgtgagttttcgttccactgagcgtcagaccccgtagaaaagatcaaaggatcttcttgagatcctttttttctgcgcgtaatctgctgcttgcaaacaaaaaaaccaccgctaccagcggtggtttgtttgccggatcaagagctaccaactctttttccgaaggtaactggcttcagcagagcgcagataccaaatactgtccttctagtgtagccgtagttaggccaccacttcaagaactctgtagcaccgcctacatacctcgctctgctaatcctgttaccagtggctgctgccagtggcgataagtcgtgtcttaccgggttggactcaagacgatagttaccggataaggcgcagcggtcgggctgaacggggggttcgtgcacacagcccagcttggagcgaacgacctacaccgaactgagatacctacagcgtgagctatgagaaagcgccacgcttcccgaagggagaaaggcggacaggtatccggtaagcggcagggtcggaacaggagagcgcacgagggagcttccagggggaaacgcctggtatctttatagtcctgtcgggtttcgccacctctgacttgagcgtcgatttttgtgatgctcgtcaggggggcggagcctatggaaaaacgccagcaacgcggcctttttacggttcctggccttttgctggccttttgctcacatgttctttcctgcgttatcccctgattctgtggataaccgtattaccgcctttgagtgagctgataccgctcgccgcagccgaacgaccgagcgcagcgagtcagtgagcgaggaagcggaagagcgcctgatgcggtattttctccttacgcatctgtgcggtatttcacaccgcatatggtgcactctcagtacaatctgctctgatgccgcatagttaagccagtatacactccgctatcgctacgtgactgggtcatggctgcgccccgacacccgccaacacccgctgacgcgccctgacgggcttgtctgctcccggcatccgcttacagacaagctgtgaccgtctccgggagctgcatgtgtcagaggttttcaccgtcatcaccgaaacgcgcgaggcagcagatcaattcgcgcgcgaaggcgaagcggcatgcatttacgttgacaccatcgaatggtgcaaaacctttcgcggtatggcatgatagcgcccggaagagagtcaattcagggtggtgaatgtgaaaccagtaacgttatacgatgtcgcagagtatgccggtgtctcttatcagaccgtttcccgcgtggtgaaccaggccagccacgtttctgcgaaaacgcgggaaaaagtggaagcggcgatggcggagctgaattacattcccaaccgcgtggcacaacaactggcgggcaaacagtcgttgctgattggcgttgccacctccagtctggccctgcacgcgccgtcgcaaattgtcgcggcgattaaatctcgcgccgatcaactgggtgccagcgtggtggtgtcgatggtagaacgaagcggcgtcgaagcctgtaaagcggcggtgcacaatcttctcgcgcaacgcgtcagtgggctgatcattaactatccgctggatgaccaggatgccattgctgtggaagctgcctgcactaatgttccggcgttatttcttgatgtctctgaccagacacccatcaacagtattattttctcccatgaagacggtacgcgactgggcgtggagcatctggtcgcattgggtcaccagcaaatcgcgctgttagcgggcccattaagttctgtctcggcgcgtctgcgtctggctggctggcataaatatctcactcgcaatcaaattcagccgatagcggaacgggaaggcgactggagtgccatgtccggttttcaacaaaccatgcaaatgctgaatgagggcatcgttcccactgcgatgctggttgccaacgatcagatggcgctgggcgcaatgcgcgccattaccgagtccgggctgcgcgttggtgcggatatctcggtagtgggatacgacgataccgaagacagctcatgttatatcccgccgtcaaccaccatcaaacaggattttcgcctgctggggcaaaccagcgtggaccgcttgctgcaactctctcagggccaggcggtgaagggcaatcagctgttgcccgtctcactggtgaaaagaaaaaccaccctggcgcccaatacgcaaaccgcctctccccgcgcgttggccgattcattaatgcagctggcacgacaggtttcccgactggaaagcgggcagtgagcgcaacgcaattaatgtgagttagcgcgaattgatctggtttgacagcttatcatcgactgcacggtgcaccaatgcttctggcgtcaggcagccatcggaagctgtggtatggctgtgcaggtcgtaaatcactgcataattcgtgtcgctcaaggcgcactcccgttctggataatgttttttgcgccgacatcataacggttctggcaaatattctgaaatgagctgttgacaattaatcatccggctcgtataatgtgtggaattgtgagcggataacaatttcacacaggaaacagcgccgctgagaaaaagcgaagcggcactgctctttaacaatttatcagacaatctgtgtgggcactcgaccggaattatcgattaactttattattaaaaattaaagaggtatatattaatgtatcgattaaataaggaggaataaaccatggccggtacgggtcgtttggctggtaaaattgcattgatcaccggtggtgctggtaacattggttccgagctgacccgccgttttctggccgagggtgcgacggttattatcagcggccgtaaccgtgcgaagctgaccgcgctggccgagcgcatgcaagccgaggccggcgtgccggccaagcgcattgatttggaggtgatggatggttccgaccctgtggctgtccgtgccggtatcgaggcaatcgtcgctcgccacggtcagattgacattctggttaacaacgcgggctccgccggtgcccaacgtcgcttggcggaaattccgctgacggaggcagaattgggtccgggtgcggaggagactttgcacgcttcgatcgcgaatctgttgggcatgggttggcacctgatgcgtattgcggctccgcacatgccagttggctccgcagttatcaacgtttcgactattttctcgcgcgcagagtactatggtcgcattccgtacgttaccccgaaggcagcgctgaacgctttgtcccagctggctgcccgcgagctgggcgctcgtggcatccgcgttaacactattttcccaggtcctattgagtccgaccgcatccgtaccgtgtttcaacgtatggatcaactgaagggtcgcccggagggcgacaccgcccatcactttttgaacaccatgcgcctgtgccgcgcaaacgaccaaggcgctttggaacgccgctttccgtccgttggcgatgttgctgatgcggctgtgtttctggcttctgctgagagcgcggcactgtcgggtgagacgattgaggtcacccacggtatggaactgccggcgtgtagcgaaacctccttgttggcgcgtaccgatctgcgtaccatcgacgcgagcggtcgcactaccctgatttgcgctggcgatcaaattgaagaagttatggccctgacgggcatgctgcgtacgtgcggtagcgaagtgattatcggcttccgttctgcggctgccctggcgcaatttgagcaggcagtgaatgaatctcgccgtctggcaggtgcggatttcaccccgccgatcgctttgccgttggacccacgtgacccggccaccattgatgcggttttcgattggggcgcaggcgagaatacgggtggcatccatgcggcggtcattctgccggcaacctcccacgaaccggctccgtgcgtgattgaagtcgatgacgaacgcgtcctgaatttcctggccgatgaaattaccggcaccatcgttattgcgagccgtttggcgcgctattggcaatcccaacgcctgaccccgggtgcccgtgcccgcggtccgcgtgttatctttctgagcaacggtgccgatcaaaatggtaatgtttacggtcgtattcaatctgcggcgatcggtcaattgattcgcgtttggcgtcacgaggcggagttggactatcaacgtgcatccgccgcaggcgatcacgttctgccgccggtttgggcgaaccagattgtccgtttcgctaaccgctccctggaaggtctggagttcgcgtgcgcgtggaccgcacagctgctgcacagccaacgtcatattaacgaaattacgctgaacattccagccaatattagcgcgaccacgggcgcacgttccgccagcgtcggctgggccgagtccttgattggtctgcacctgggcaaggtggctctgattaccggtggttcggcgggcatcggtggtcaaatcggtcgtctgctggccttgtctggcgcgcgtgtgatgctggccgctcgcgatcgccataaattggaacagatgcaagccatgattcaaagcgaattggcggaggttggttataccgatgtggaggaccgtgtgcacatcgctccgggttgcgatgtgagcagcgaggcgcagctggcagatctggtggaacgtacgctgtccgcattcggtaccgtggattatttgattaataacgccggtattgcgggcgtggaggagatggtgatcgacatgccggtggaaggctggcgtcacaccctgtttgccaacctgatttcgaattattcgctgatgcgcaagttggcgccgctgatgaagaagcaaggtagcggttacatcctgaacgtttcttcctattttggcggtgagaaggacgcggcgattccttatccgaaccgcgccgactacgccgtctccaaggctggccaacgcgcgatggcggaagtgttcgctcgtttcctgggtccagagattcagatcaatgctattgccccaggtccggttgaaggcgaccgcctgcgtggtaccggtgagcgtccgggcctgtttgctcgtcgcgcccgtctgatcttggagaataaacgcctgaacgaattgcacgcggctttgattgctgcggcccgcaccgatgagcgctcgatgcacgagttggttgaattgttgctgccgaacgacgtggccgcgttggagcagaacccagcggcccctaccgcgctgcgtgagctggcacgccgcttccgtagcgaaggtgatccggcggcaagctcctcgtccgccttgctgaatcgctccatcgctgccaagctgttggctcgcttgcataacggtggctatgtgctgccggcggatatttttgcaaatctgcctaatccgccggacccgttctttacccgtgcgcaaattgaccgcgaagctcgcaaggtgcgtgatggtattatgggtatgctgtatctgcagcgtatgccaaccgagtttgacgtcgctatggcaaccgtgtactatctggccgatcgtaacgtgagcggcgaaactttccatccgtctggtggtttgcgctacgagcgtaccccgaccggtggcgagctgttcggcctgccatcgccggaacgtctggcggagctggttggtagcacggtgtacctgatcggtgaacacctgaccgagcacctgaacctgctggctcgtgcctatttggagcgctacggtgcccgtcaagtggtgatgattgttgagacggaaaccggtgcggaaaccatgcgtcgtctgttgcatgatcacgtcgaggcaggtcgcctgatgactattgtggcaggtgatcagattgaggcagcgattgaccaagcgatcacgcgctatggccgtccgggtccggtggtgtgcactccattccgtccactgccaaccgttccgctggtcggtcgtaaagactccgattggagcaccgttttgagcgaggcggaatttgcggaactgtgtgagcatcagctgacccaccatttccgtgttgctcgtaagatcgccttgtcggatggcgcgtcgctggcgttggttaccccggaaacgactgcgactagcaccacggagcaatttgctctggcgaacttcatcaagaccaccctgcacgcgttcaccgcgaccatcggtgttgagtcggagcgcaccgcgcaacgtattctgattaaccaggttgatctgacgcgccgcgcccgtgcggaagagccgcgtgacccgcacgagcgtcagcaggaattggaacgcttcattgaagccgttctgctggttaccgctccgctgcctcctgaggcagacacgcgctacgcaggccgtattcaccgcggtcgtgcgattaccgtctaatagaagctaaacacatgtaggtttgaatttgggagttaaccacgcggcttgccaacggggtctgaatcgctttttttgtatataatgcgtgtgaaatttcataccacaggcgaaggaggaaaaatcatgaccaagtatgcactggtgggcgatgtgggtggcaccaatgcgcgtctggcgctgtgcgacattgcctcgggtgagattagccaagcgaaaacctatagcggcttggactacccgtccctggaggcggtgatccgtgtctacctggaagaacataaagtcgaggtgaaggacggctgtatcgccattgcgtgcccgattaccggcgactgggtggcgatgacgaatcacacctgggcattcagcattgcagagatgaagaaaaacctgggctttagccacctggagattatcaacgacttcacggccgtttcgatggcgattccgatgctgaagaaagaacatctgattcaatttggtggtgcggagccggtggagggtaagccgatcgcggtctacggcgctggcacgggcctgggcgtggcgcacctggtgcatgttgacaagcgttgggttagcctgccgggtgaaggtggccacgttgattttgcgccaaatagcgaagaagaagcgatcattctggaaatcctgcgtgcggaaattggtcacgtttccgcagagcgtgttctgagcggtcctggtttggtgaacctgtatcgtgcaattgtgaaagcagataatcgcttgccggagaacttgaaaccgaaggacatcaccgaacgcgcgctggcagatagctgcaccgattgccgccgtgcgctgtctttgttctgcgtcatcatgggtcgttttggtggcaatctggcactgaacctgggcacctttggtggcgtgttcatcgcaggcggtattgtcccgcgttttctggagttcttcaaggcttcgggcttccgcgcagcgttcgaagataaaggtcgtttcaaagaatacgttcacgatattccggtctatctgatcgtccatgacaaccctggcctgttgggcagcggtgcccatctgcgtcagaccctgggtcacattctgtaatagcccgggatgtctatcttaaggtagccaaagtttaaactttggctaccttaagatagacatattcttgccgcactagaggcctgtcaggccggcgccattgggtcatcggatcccgggcccgtcagcttggctgttttggcggatgagagaagattttcagcctgatacagattaaatcagaacgcagaagcggtctgataaaacagaatttgcctggcggcagtagcgcggtggtcccacctgaccccatgccgaactcagaagtgaaacgccgtagcgccgatggtagtgtggggtctccccat

SEQ ID NO: 182 - DNA, 3822 bp, Artificial Sequence
  Description of Artificial Sequence: Synthetic rbs accADBC polynucleotide
aggaggaaatacatatgtctctgaacttcctggacttcgagcagccgatcgccgaactggaggcgaagattgacagcctgaccgcggttagccgtcaagatgagaaactggacattaacatcgacgaagaggtccaccgtttgcgtgagaagtctgttgaactgactcgcaaaatctttgctgatttgggcgcatggcagattgcccagttggctcgccacccacaacgcccatataccctggactacgtgcgcctggcgtttgacgagttcgacgaactggcaggcgaccgcgcctatgcggacgataaagcaattgtcggcggtattgctcgtttggatggccgtccggtgatgattatcggccatcaaaaaggccgcgagacaaaggaaaagattcgtcgtaatttcggaatgccggcaccggagggctaccgcaaggccctgcgtctgatgcaaatggccgaacgctttaagatgccgattatcacgttcattgatacgcctggtgcgtacccaggcgttggtgcggaagagcgtggtcagagcgaggccatcgcacgtaacctgcgtgagatgtctcgtctgggtgtgccggtcgtttgcaccgtgattggcgagggcggtagcggtggtgcgttggcgatcggtgtcggtgataaggtcaacatgctgcaatacagcacgtacagcgtcattagcccggaaggttgcgcttccattctgtggaagagcgcggataaagcaccattggcagcggaagcgatgggtatcatcgcaccgcgtctgaaagaactgaagttgattgattctatcatcccggaaccgctgggcggtgctcaccgtaatccggaggcgatggcagccagcctgaaggcccagctgctggcggacctggcggatctggacgtgctgagcacggaggatctgaaaaaccgtcgctatcagcgcttgatgagctatggctacgcctaaggtacctttatcaatttatttaaggaggactcttaagatgagctggatcgagcgcatcaagagcaacatcaccccgacccgcaaggcgagcatccctgaaggcgtctggaccaaatgcgatagctgcggtcaggttttgtatcgtgcggagctggagcgtaacctggaagtgtgcccgaaatgcgaccatcacatgcgtatgaccgctcgtaatcgtctgcatagcctgctggatgagggcagcctggtcgagctgggtagcgaactggaaccgaaagatgttctgaaattccgtgattccaagaagtataaggatcgtttggcatctgcacaaaaagaaaccggtgagaaggacgcactggttgttatgaaaggcaccctgtatggtatgccggttgttgctgcggcgttcgagtttgcgtttatgggtggcagcatgggttccgtggtgggcgcacgctttgtgcgtgccgtggagcaggcgctggaggataactgtcctctgatttgtttcagcgcgagcggtggtgcgcgtatgcaagaggccctgatgagcctgatgcagatggcaaaaacctcggcagccctggcgaagatgcaagaacgcggcctgccgtacatttccgtcctgaccgaccctacgatgggcggtgtcagcgccagctttgcgatgctgggtgatttgaacatcgcagagccgaaggctctgattggttttgctggtccgcgtgttattgaacagacggttcgcgaaaagttgccgcctggtttccagcgcagcgagttcctgattgagaaaggtgccatcgacatgatcgttcgccgtccagaaatgcgtctgaaactggcgagcattctggcgaaattgatgaatctgccggctccgaatcctgaagcaccgcgtgagggtgtcgtggttccgccggtcccggaccaagagccggaggcttaattaaccaaattagaagtattttatttagaggaggtagccatggacatccgcaagatcaagaagctgatcgaactggtggaagagtctggcatcagcgagctggagatcagcgaaggtgaagagagcgtccgtatttcccgtgcggcaccggcagcgagctttccggttatgcagcaagcatacgccgctccgatgatgcaacagccggcacagagcaacgccgctgcaccggcgaccgttccaagcatggaggcaccggcagcggccgagatttcgggtcatatcgtgcgtagcccgatggtgggcaccttctatcgcacgccgtcgccggacgcaaaagccttcatcgaagtcggccagaaggtcaatgtcggcgacacgctgtgtatcgttgaggcaatgaaaatgatgaaccagattgaagcggataagagcggtactgttaaagcgatcctggtggaatccggccagcctgttgagttcgatgaaccgctggttgtgatcgagtaagagctccggatatacggggaagaacaaggggtgtacatgctggacaagatcgtcatcgccaaccgcggcgaaatcgccctgcgcatcttgcgcgcgtgtaaagagctgggcattaagactgttgccgtgcattccagcgcagaccgcgacctgaagcatgttctgctggccgacgaaacggtttgcatcggtccggcaccgagcgtgaaaagctatctgaacatcccggccatcatctctgcggcagagatcaccggtgcagtggcgattcatccgggctacggtttcctgagcgagaacgctaactttgctgaacaagtggagcgtagcggtttcatcttcattggccctaaggcggagacgattcgcctgatgggcgacaaagtgagcgccattgcagcgatgaaaaaggccggtgtgccgtgtgttccgggcagcgatggtccgctgggtgacgatatggacaagaaccgtgccatcgctaaacgtattggctacccggtcattatcaaagcctctggtggtggcggtggccgtggtatgcgtgtcgtccgtggtgatgcggaactggcgcaaagcatcagcatgacccgtgcggaagccaaagcggcgttctctaacgatatggtgtatatggagaagtatctggagaatccgcgccacgttgaaatccaagttctggcggatggtcagggcaatgcgatctacttggcagaacgtgattgctccatgcaacgccgtcatcagaaggtggtggaagaggcaccggctccgggtattacgccggaactgcgtcgctacatcggtgagcgctgtgcgaaagcgtgtgtggacattggttaccgtggtgcgggtacgtttgagttcctgttcgaaaatggtgagttttacttcattgaaatgaatacccgcatccaggttgagcacccggtgaccgagatgattactggcgttgatctgatcaaagagcaactgcgcattgcggctggtcagccgctgtcgatcaagcaagaagaggtgcacgttcgtggtcacgcggtcgagtgccgtatcaatgcggaggacccgaatacctttctgccgagccctggtaagatcactcgttttcacgcgccaggtggttttggcgttcgttgggagtctcacatctacgccggttacaccgtgccgccgtactatgacagcatgattggtaaactgatctgctatggcgaaaatcgtgatgtcgcgatcgcccgcatgaaaaacgcgctgcaagagctgatcattgatggcattaagaccaatgtggatttgcagatccgcattatgaacgacgagaatttccagcacggcggtacgaacattcactacctggaaaagaaactgggcctgcaagagaaataa

SEQ ID NO: 183 - DNA, 7721 bp, Artificial Sequence
  Description of Artificial Sequence: Synthetic pACYC-T7-rbs accADBC polynucleotide
gacgaattctctagatatcggccggccacgcgatcgctgacgtcggtaccctcgagtctggtaaagaaaccgctgctgcgaaatttgaacgccagcacatggactcgtctactagcgcagcttaattaacctaggctgctgccaccgctgagcaataactagcataaccccttggggcctctaaacgggtcttgaggggttttttgctgaaacctcaggcatttgagaagcacacggtcacactgcttccggtagtcaataaaccggtaaaccagcaatagacataagcggctatttaacgaccctgccctgaaccgacgaccgggtcgaatttgctttcgaatttctgccattcatccgcttattatcacttattcaggcgtagcaccaggcgtttaagggcaccaataactgccttaaaaaaattacgccccgccctgccactcatcgcagtactgttgtaattcattaagcattctgccgacatggaagccatcacagacggcatgatgaacctgaatcgccagcggcatcagcaccttgtcgccttgcgtataatatttgcccatagtgaaaacgggggcgaagaagttgtccatattggccacgtttaaatcaaaactggtgaaactcacccagggattggctgagacgaaaaacatattctcaataaaccctttagggaaataggccaggttttcaccgtaacacgccacatcttgcgaatatatgtgtagaaactgccggaaatcgtcgtggtattcactccagagcgatgaaaacgtttcagtttgctcatggaaaacggtgtaacaagggtgaacactatcccatatcaccagctcaccgtctttcattgccatacggaactccggatgagcattcatcaggcgggcaagaatgtgaataaaggccggataaaacttgtgcttatttttctttacggtctttaaaaaggccgtaatatccagctgaacggtctggttataggtacattgagcaactgactgaaatgcctcaaaatgttctttacgatgccattgggatatatcaacggtggtatatccagtgatttttttctccattttagcttccttagctcctgaaaatctcgataactcaaaaaatacgcccggtagtgatcttatttcattatggtgaaagttggaacctcttacgtgccgatcaacgtctcattttcgccaaaagttggcccagggcttcccggtatcaacagggacaccaggatttatttattctgcgaagtgatcttccgtcacaggtatttattcggcgcaaagtgcgtcgggtgatgctgccaacttactgatttagtgtatgatggtgtttttgaggtgctccagtggcttctgtttctatcagctgtccctcctgttcagctactgacggggtggtgcgtaacggcaaaagcaccgccggacatcagcgctagcggagtgtatactggcttactatgttggcactgatgagggtgtcagtgaagtgcttcatgtggcaggagaaaaaaggctgcaccggtgcgtcagcagaatatgtgatacaggatatattccgcttcctcgctcactgactcgctacgctcggtcgttcgactgcggcgagcggaaatggcttacgaacggggcggagatttcctggaagatgccaggaagatacttaacagggaagtgagagggccgcggcaaagccgtttttccataggctccgcccccctgacaagcatcacgaaatctgacgctcaaatcagtggtggcgaaacccgacaggactataaagataccaggcgtttcccctggcggctccctcgtgcgctctcctgttcctgcctttcggtttaccggtgtcattccgctgttatggccgcgtttgtctcattccacgcctgacactcagttccgggtaggcagttcgctccaagctggactgtatgcacgaaccccccgttcagtccgaccgctgcgccttatccggtaactatcgtcttgagtccaacccggaaagacatgcaaaagcaccactggcagcagccactggtaattgatttagaggagttagtcttgaagtcatgcgccggttaaggctaaactgaaaggacaagttttggtgactgcgctcctccaagccagttacctcggttcaaagagttggtagctcagagaaccttcgaaaaaccgccctgcaaggcggttttttcgttttcagagcaagagattacgcgcagaccaaaacgatctcaagaagatcatcttattaatcagataaaatatttctagatttcagtgcaatttatctcttcaaatgtagcacctgaagtcagccccatacgatataagttgtaattctcatgttagtcatgccccgcgcccaccggaaggagctgactgggttgaaggctctcaagggcatcggtcgagatcccggtgcctaatgagtgagctaacttacattaattgcgttgcgctcactgcccgctttccagtcgggaaacctgtcgtgccagctgcattaatgaatcggccaacgcgcggggagaggcggtttgcgtattgggcgccagggtggtttttcttttcaccagtgagacgggcaacagctgattgcccttcaccgcctggccctgagagagttgcagcaagcggtccacgctggtttgccccagcaggcgaaaatcctgtttgatggtggttaacggcgggatataacatgagctgtcttcggtatcgtcgtatcccactaccgagatgtccgcaccaacgcgcagcccggactcggtaatggcgcgcattgcgcccagcgccatctgatcgttggcaaccagcatcgcagtgggaacgatgccctcattcagcatttgcatggtttgttgaaaaccggacatggcactccagtcgccttcccgttccgctatcggctgaatttgattgcgagtgagatatttatgccagccagccagacgcagacgcgccgagacagaacttaatgggcccgctaacagcgcgatttgctggtgacccaatgcgaccagatgctccacgcccagtcgcgtaccgtcttcatgggagaaaataatactgttgatgggtgtctggtcagagacatcaagaaataacgccggaacattagtgcaggcagcttccacagcaatggcatcctggtcatccagcggatagttaatgatcagcccactgacgcgttgcgcgagaagattgtgcaccgccgctttacaggcttcgacgccgcttcgttctaccatcgacaccaccacgctggcacccagttgatcggcgcgagatttaatcgccgcgacaatttgcgacggcgcgtgcagggccagactggaggtggcaacgccaatcagcaacgactgtttgcccgccagttgttgtgccacgcggttgggaatgtaattcagctccgccatcgccgcttccactttttcccgcgttttcgcagaaacgtggctggcctggttcaccacgcgggaaacggtctgataagagacaccggcatactctgcgacatcgtataacgttactggtttcacattcaccaccctgaattgactctcttccgggcgctatcatgccataccgcgaaaggttttgcgccattcgatggtgtccgggatctcgacgctctcccttatgcgactcctgcattaggaaattaatacgactcactataggggaattgtgagcggataacaattcccctgtagaaataattttgtttaactttaataaggagatataccatgggcagcagccatcaccatcatcaccacagccaggatccgaattcgagatcaagcttgaattcgttcgaatgcatctagatccaattctagacgtcgaacctctctaaaactaaggaggaaatacatatgtctctgaacttcctggacttcgagcagccgatcgccgaactggaggcgaagattgacagcctgaccgcggttagccgtcaagatgagaaactggacattaacatcgacgaagaggtccaccgtttgcgtgagaagtctgttgaactgactcgcaaaatctttgctgatttgggcgcatggcagattgcccagttggctcgccacccacaacgcccatataccctggactacgtgcgcctggcgtttgacgagttcgacgaactggcaggcgaccgcgcctatgcggacgataaagcaattgtcggcggtattgctcgtttggatggccgtccggtgatgattatcggccatcaaaaaggccgcgagacaaaggaaaagattcgtcgtaatttcggaatgccggcaccggagggctaccgcaaggccctgcgtctgatgcaaatggccgaacgctttaagatgccgattatcacgttcattgatacgcctggtgcgtacccaggcgttggtgcggaagagcgtggtcagagcgaggccatcgcacgtaacctgcgtgagatgtctcgtctgggtgtgccggtcgtttgcaccgtgattggcgagggcggtagcggtggtgcgttggcgatcggtgtcggtgataaggtcaacatgctgcaatacagcacgtacagcgtcattagcccggaaggttgcgcttccattctgtggaagagcgcggataaagcaccattggcagcggaagcgatgggtatcatcgcaccgcgtctgaaagaactgaagttgattgattctatcatcccggaaccgctgggcggtgctcaccgtaatccggaggcgatggcagccagcctgaaggcccagctgctggcggacctggcggatctggacgtgctgagcacggaggatctgaaaaaccgtcgctatcagcgcttgatgagctatggctacgcctaaggtacctttatcaatttatttaaggaggactcttaagatgagctggatcgagcgcatcaagagcaacatcaccccgacccgcaaggcgagcatccctgaaggcgtctggaccaaatgcgatagctgcggtcaggttttgtatcgtgcggagctggagcgtaacctggaagtgtgcccgaaatgcgaccatcacatgcgtatgaccgctcgtaatcgtctgcatagcctgctggatgagggcagcctggtcgagctgggtagcgaactggaaccgaaagatgttctgaaattccgtgattccaagaagtataaggatcgtttggcatctgcacaaaaagaaaccggtgagaaggacgcactggttgttatgaaaggcaccctgtatggtatgccggttgttgctgcggcgttcgagtttgcgtttatgggtggcagcatgggttccgtggtgggcgcacgctttgtgcgtgccgtggagcaggcgctggaggataactgtcctctgatttgtttcagcgcgagcggtggtgcgcgtatgcaagaggccctgatgagcctgatgcagatggcaaaaacctcggcagccctggcgaagatgcaagaacgcggcctgccgtacatttccgtcctgaccgaccctacgatgggcggtgtcagcgccagctttgcgatgctgggtgatttgaacatcgcagagccgaaggctctgattggttttgctggtccgcgtgttattgaacagacggttcgcgaaaagttgccgcctggtttccagcgcagcgagttcctgattgagaaaggtgccatcgacatgatcgttcgccgtccagaaatgcgtctgaaactggcgagcattctggcgaaattgatgaatctgccggctccgaatcctgaagcaccgcgtgagggtgtcgtggttccgccggtcccggaccaagagccggaggcttaattaaccaaattagaagtattttatttagaggaggtagccatggacatccgcaagatcaagaagctgatcgaactggtggaagagtctggcatcagcgagctggagatcagcgaaggtgaagagagcgtccgtatttcccgtgcggcaccggcagcgagctttccggttatgcagcaagcatacgccgctccgatgatgcaacagccggcacagagcaacgccgctgcaccggcgaccgttccaagcatggaggcaccggcagcggccgagatttcgggtcatatcgtgcgtagcccgatggtgggcaccttctatcgcacgccgtcgccggacgcaaaagccttcatcgaagtcggccagaaggtcaatgtcggcgacacgctgtgtatcgttgaggcaatgaaaatgatgaaccagattgaagcggataagagcggtactgttaaagcgatcctggtggaatccggccagcctgttgagttcgatgaaccgctggttgtgatcgagtaagagctccggatatacggggaagaacaaggggtgtacatgctggacaagatcgtcatcgccaaccgcggcgaaatcgccctgcgcatcttgcgcgcgtgtaaagagctgggcattaagactgttgccgtgcattccagcgcagaccgcgacctgaagcatgttctgctggccgacgaaacggtttgcatcggtccggcaccgagcgtgaaaagctatctgaacatcccggccatcatctctgcggcagagatcaccggtgcagtggcgattcatccgggctacggtttcctgagcgagaacgctaactttgctgaacaagtggagcgtagcggtttcatcttcattggccctaaggcggagacgattcgcctgatgggcgacaaagtgagcgccattgcagcgatgaaaaaggccggtgtgccgtgtgttccgggcagcgatggtccgctgggtgacgatatggacaagaaccgtgccatcgctaaacgtattggctacccggtcattatcaaagcctctggtggtggcggtggccgtggtatgcgtgtcgtccgtggtgatgcggaactggcgcaaagcatcagcatgacccgtgcggaagccaaagcggcgttctctaacgatatggtgtatatggagaagtatctggagaatccgcgccacgttgaaatccaagttctggcggatggtcagggcaatgcgatctacttggcagaacgtgattgctccatgcaacgccgtcatcagaaggtggtggaagaggcaccggctccgggtattacgccggaactgcgtcgctacatcggtgagcgctgtgcgaaagcgtgtgtggacattggttaccgtggtgcgggtacgtttgagttcctgttcgaaaatggtgagttttacttcattgaaatgaatacccgcatccaggttgagcacccggtgaccgagatgattactggcgttgatctgatcaaagagcaactgcgcattgcggctggtcagccgctgtcgatcaagcaagaagaggtgcacgttcgtggtcacgcggtcgagtgccgtatcaatgcggaggacccgaatacctttctgccgagccctggtaagatcactcgttttcacgcgccaggtggttttggcgttcgttgggagtctcacatctacgccggttacaccgtgccgccgtactatgacagcatgattggtaaactgatctgctatggcgaaaatcgtgatgtcgcgatcgcccgcatgaaaaacgcgctgcaagagctgatcattgatggcattaagaccaatgtggatttgcagatccgcattatgaacgacgagaatttccagcacggcggtacgaacattcactacctggaaaagaaactgggcctgcaagagaaataactgcagagg

SEQ ID NO: 184 - DNA, 6862 bp, Artificial Sequence
  Description of Artificial Sequence: Synthetic pACYC-pyibD-rbsaccADBC polynucleotide
gacgaattctctagatgcatgatcgtgctcctgtcgttgaggacccggctaggctggcggggttgccttactggttagcagaatgaatcaccgatacgcgagcgaacgtgaagcgactgctgctgcaaaacgtctgcgacctgagcaacaacatgaatggtcttcggtttccgtgtttcgtaaagtctggaaacgcggaagtcccctacgtgctgctgaagttgcccgcaacagagagtggaaccaaccggtgataccacgatactatgactgagagtcaacgccatgagcggcctcatttcttattctgagttacaacagtccgcaccgctgtccggtagctccttccggtgggcgcggggcatgactatcgtcgccgcacttatgactgtcttctttatcatgcaactcgtaggacaggtgccggcagcgcccaacagtcccccggccacggggcctgccaccatacccacgccgaaacaagcgccctgcaccattatgttccggatctgcatcgcaggatgctgctggctaccctgtggaacacctacatctgtattaacgaagcgctaaccgtttttatcaggctctgggaggcagaataaatgatcatatcgtcaattattacctccacggggagagcctgagcaaactggcctcaggcatttgagaagcacacggtcacactgcttccggtagtcaataaaccggtaaaccagcaatagacataagcggctatttaacgaccctgccctgaaccgacgaccgggtcgaatttgctttcgaatttctgccattcatccgcttattatcacttattcaggcgtagcaccaggcgtttaagggcaccaataactgccttaaaaaaattacgccccgccctgccactcatcgcagtactgttgtaattcattaagcattctgccgacatggaagccatcacagacggcatgatgaacctgaatcgccagcggcatcagcaccttgtcgccttgcgtataatatttgcccatagtgaaaacgggggcgaagaagttgtccatattggccacgtttaaatcaaaactggtgaaactcacccagggattggctgagacgaaaaacatattctcaataaaccctttagggaaataggccaggttttcaccgtaacacgccacatcttgcgaatatatgtgtagaaactgccggaaatcgtcgtggtattcactccagagcgatgaaaacgtttcagtttgctcatggaaaacggtgtaacaagggtgaacactatcccatatcaccagctcaccgtctttcattgccatacggaactccggatgagcattcatcaggcgggcaagaatgtgaataaaggccggataaaacttgtgcttatttttctttacggtctttaaaaaggccgtaatatccagctgaacggtctggttataggtacattgagcaactgactgaaatgcctcaaaatgttctttacgatgccattgggatatatcaacggtggtatatccagtgatttttttctccattttagcttccttagctcctgaaaatctcgataactcaaaaaatacgcccggtagtgatcttatttcattatggtgaaagttggaacctcttacgtgccgatcaacgtctcattttcgccaaaagttggcccagggcttcccggtatcaacagggacaccaggatttatttattctgcgaagtgatcttccgtcacaggtatttattcggcgcaaagtgcgtcgggtgatgctgccaacttactgatttagtgtatgatggtgtttttgaggtgctccagtggcttctgtttctatcagctgtccctcctgttcagctactgacggggtggtgcgtaacggcaaaagcaccgccggacatcagcgctagcggagtgtatactggcttactatgttggcactgatgagggtgtcagtgaagtgcttcatgtggcaggagaaaaaaggctgcaccggtgcgtcagcagaatatgtgatacaggatatattccgcttcctcgctcactgactcgctacgctcggtcgttcgactgcggcgagcggaaatggcttacgaacggggcggagatttcctggaagatgccaggaagatacttaacagggaagtgagagggccgcggcaaagccgtttttccataggctccgcccccctgacaagcatcacgaaatctgacgctcaaatcagtggtggcgaaacccgacaggactataaagataccaggcgtttccccctggcggctccctcgtgcgctctcctgttcctgcctttcggtttaccggtgtcattccgctgttatggccgcgtttgtctcattccacgcctgacactcagttccgggtaggcagttcgctccaagctggactgtatgcacgaaccccccgttcagtccgaccgctgcgccttatccggtaactatcgtcttgagtccaacccggaaagacatgcaaaagcaccactggcagcagccactggtaattgatttagaggagttagtcttgaagtcatgcgccggttaaggctaaactgaaaggacaagttttggtgactgcgctcctccaagccagttacctcggttcaaagagttggtagctcagagaaccttcgaaaaaccgccctgcaaggcggttttttcgttttcagagcaagagattacgcgcagaccaaaacgatctcaagaagatcatcttattaatcagataaaatatttctagatttcagtgcaatttatctcttcaaatgtagcacctgaagtcagccccatacgatataagttgtaattctcatgtttgacagcttatcatcgatacagtccagttacgctggagtctgaggctcgtcctgaatgatatgcggcctccacgtgcgtaattgtgctgatctcttatatagctgctctcattatctctctaccctgaagtgactctctcacctgtaaaaataatatctcacaggcttaatagtttcttaatacaaagcctgtaaaacgtcaggataacttctgtgtaggaggataatccatgagtctgaacttcctggacttcgagcagccgatcgccgaactggaggcgaagattgacagcctgaccgcggttagccgtcaagatgagaaactggacattaacatcgacgaagaggtccaccgtttgcgtgagaagtctgttgaactgactcgcaaaatctttgctgatttgggcgcatggcagattgcccagttggctcgccacccacaacgcccatataccctggactacgtgcgcctggcgtttgacgagttcgacgaactggcaggcgaccgcgcctatgcggacgataaagcaattgtcggcggtattgctcgtttggatggccgtccggtgatgattatcggccatcaaaaaggccgcgagacaaaggaaaagattcgtcgtaatttcggaatgccggcaccggagggctaccgcaaggccctgcgtctgatgcaaatggccgaacgctttaagatgccgattatcacgttcattgatacgcctggtgcgtacccaggcgttggtgcggaagagcgtggtcagagcgaggccatcgcacgtaacctgcgtgagatgtctcgtctgggtgtgccggtcgtttgcaccgtgattggcgagggcggtagcggtggtgcgttggcgatcggtgtcggtgataaggtcaacatgctgcaatacagcacgtacagcgtcattagcccggaaggttgcgcttccattctgtggaagagcgcggataaagcaccattggcagcggaagcgatgggtatcatcgcaccgcgtctgaaagaactgaagttgattgattctatcatcccggaaccgctgggcggtgctcaccgtaatccggaggcgatggcagccagcctgaaggcccagctgctggcggacctggcggatctggacgtgctgagcacggaggatctgaaaaaccgtcgctatcagcgcttgatgagctatggctacgcctaaggtacctttatcaatttatttaaggaggactcttaagatgagctggatcgagcgcatcaagagcaacatcaccccgacccgcaaggcgagcatccctgaaggcgtctggaccaaatgcgatagctgcggtcaggttttgtatcgtgcggagctggagcgtaacctggaagtgtgcccgaaatgcgaccatcacatgcgtatgaccgctcgtaatcgtctgcatagcctgctggatgagggcagcctggtcgagctgggtagcgaactggaaccgaaagatgttctgaaattccgtgattccaagaagtataaggatcgtttggcatctgcacaaaaagaaaccggtgagaaggacgcactggttgttatgaaaggcaccctgtatggtatgccggttgttgctgcggcgttcgagtttgcgtttatgggtggcagcatgggttccgtggtgggcgcacgctttgtgcgtgccgtggagcaggcgctggaggataactgtcctctgatttgtttcagcgcgagcggtggtgcgcgtatgcaagaggccctgatgagcctgatgcagatggcaaaaacctcggcagccctggcgaagatgcaagaacgcggcctgccgtacatttccgtcctgaccgaccctacgatgggcggtgtcagcgccagctttgcgatgctgggtgatttgaacatcgcagagccgaaggctctgattggttttgctggtccgcgtgttattgaacagacggttcgcgaaaagttgccgcctggtttccagcgcagcgagttcctgattgagaaaggtgccatcgacatgatcgttcgccgtccagaaatgcgtctgaaactggcgagcattctggcgaaattgatgaatctgccggctccgaatcctgaagcaccgcgtgagggtgtcgtggttccgccggtcccggaccaagagccggaggcttaattaaccaaattagaagtattttatttagaggaggtagccatggacatccgcaagatcaagaagctgatcgaactggtggaagagtctggcatcagcgagctggagatcagcgaaggtgaagagagcgtccgtatttcccgtgcggcaccggcagcgagctttccggttatgcagcaagcatacgccgctccgatgatgcaacagccggcacagagcaacgccgctgcaccggcgaccgttccaagcatggaggcaccggcagcggccgagatttcgggtcatatcgtgcgtagcccgatggtgggcaccttctatcgcacgccgtcgccggacgcaaaagccttcatcgaagtcggccagaaggtcaatgtcggcgacacgctgtgtatcgttgaggcaatgaaaatgatgaaccagattgaagcggataagagcggtactgttaaagcgatcctggtggaatccggccagcctgttgagttcgatgaaccgctggttgtgatcgagtaagagctccggatatacggggaagaacaaggggtgtacatgctggacaagatcgtcatcgccaaccgcggcgaaatcgccctgcgcatcttgcgcgcgtgtaaagagctgggcattaagactgttgccgtgcattccagcgcagaccgcgacctgaagcatgttctgctggccgacgaaacggtttgcatcggtccggcaccgagcgtgaaaagctatctgaacatcccggccatcatctctgcggcagagatcaccggtgcagtggcgattcatccgggctacggtttcctgagcgagaacgctaactttgctgaacaagtggagcgtagcggtttcatcttcattggccctaaggcggagacgattcgcctgatgggcgacaaagtgagcgccattgcagcgatgaaaaaggccggtgtgccgtgtgttccgggcagcgatggtccgctgggtgacgatatggacaagaaccgtgccatcgctaaacgtattggctacccggtcattatcaaagcctctggtggtggcggtggccgtggtatgcgtgtcgtccgtggtgatgcggaactggcgcaaagcatcagcatgacccgtgcggaagccaaagcggcgttctctaacgatatggtgtatatggagaagtatctggagaatccgcgccacgttgaaatccaagttctggcggatggtcagggcaatgcgatctacttggcagaacgtgattgctccatgcaacgccgtcatcagaaggtggtggaagaggcaccggctccgggtattacgccggaactgcgtcgctacatcggtgagcgctgtgcgaaagcgtgtgtggacattggttaccgtggtgcgggtacgtttgagttcctgttcgaaaatggtgagttttacttcattgaaatgaatacccgcatccaggttgagcacccggtgaccgagatgattactggcgttgatctgatcaaagagcaactgcgcattgcggctggtcagccgctgtcgatcaagcaagaagaggtgcacgttcgtggtcacgcggtcgagtgccgtatcaatgcggaggacccgaatacctttctgccgagccctggtaagatcactcgttttcacgcgccaggtggttttggcgttcgttgggagtctcacatctacgccggttacaccgtgccgccgtactatgacagcatgattggtaaactgatctgctatggcgaaaatcgtgatgtcgcgatcgcccgcatgaaaaacgcgctgcaagagctgatcattgatggcattaagaccaatgtggatttgcagatccgcattatgaacgacgagaatttccagcacggcggtacgaacattcactacctggaaaagaaactgggcctgcaagagaaataactgcagagg

SEQ ID NO: 185 - DNA, 25 bp, Artificial Sequence
  Description of Artificial Sequence: Synthetic CPM1205 oligonucleotide
gcgggttagccagtgcaattaatgg

SEQ ID NO: 186 - DNA, 26 bp, Artificial Sequence
  Description of Artificial Sequence: Synthetic CPM1207 oligonucleotide
gcacgagttgttcgaaagcgaagaag

SEQ ID NO: 187 - DNA, 26 bp, Artificial Sequence
  Description of Artificial Sequence: Synthetic CPM2011 oligonucleotide
gtcgtcagttcaaggcaggataaggg

SEQ ID NO: 188 - DNA, 24 bp, Artificial Sequence
  Description of Artificial Sequence: Synthetic CPM2017 oligonucleotide
gagcttcagccagttcgggatgta

SEQ ID NO: 189 - DNA, 25 bp, Artificial Sequence
  Description of Artificial Sequence: Synthetic CPM2013 oligonucleotide
ggtgcgggcatgaccggcggtttcg

SEQ ID NO: 190 - DNA, 25 bp, Artificial Sequence
  Description of Artificial Sequence: Synthetic CPM2015 oligonucleotide
atatcgagacaatttacatggaatg

SEQ ID NO: 191 - DNA, 5902 bp, Artificial Sequence
  Description of Artificial Sequence: Synthetic pUC57-gdhA replace polynucleotide
atttaaatgtttgacagcttatcatcgactgcacggtgcaccaatgcttctggcgtcaggcagccatcggaagctgtggtatggctgtgcaggtcgtaaatcactgcataattcgtgtcgctcaaggcgcactcccgttctggataatgttttttgcgccgacatcataacggttctggcaaatattctgaaatgagctgttgacaattaatcatccggctcgtataatgtgtggaattgtgagcggataacaatttcacacaggaaacagcgccgctgagaaaaagcgaagcggcactgctctttaacaatttatcagacaatctgtgtgggcactcgaccggaattatcgattaactttattattaaaaattaaagaggtatatattaatgtatcgattaaataaggaggttataagacaattgtcctgataaacgcagcactgagtacagggctgcgctgactgcccgcctgaactgaacacttctggcggtacgtttacctccacgtccggacgataatgcgggttagccagtgcaattaatggaaatgctaatactacggcgaacaatgctcgactcacagggaactccttaacgttattgtctctgctactgataacggtagccgggtggcaaaactttagcgtctgagttatcgcatttggttatgagattactctcgttattaatttgctttcctgggtcatttttttcttgcttaccgtcacattcttgatggtatagtcgaaaactgcaaaagcacatgacataaacaacataagcacaatcgtattaatatataagggttttataactatgagcatcagcaaagcaatcgaaaaagttgaagcccgttacgcacatcagccggaatttatccaggcagtgaaagaagtggcaatcacgattaaaccgctgtatgatgcgcatccggaatacgacaaactgaaagtttttgaacgtctggtcgaaccggatcgtgtgtttggcttccgcgttaactgggaagatgacaatggcgaaattcagatcaaccgtggttggcgcgttcaattttcaaatgcactgggtccgtataaaggcggtctgcgcttccacccgaccgtcaaccagtcggtgctgaaattcctgggcttcgaacaaatcttcaaaaatgctctgacgggtctgccgatcggcggtggcaaaggtggctcagatttcgacccgaaaggcaaaaccgattcggaaattcgtcgcttttgctatgccttcatgcgtgaactgcatcactacgttaacaaagatatggacgtcccggcaggtgatattggtgtcggtggccgtgaagtgagctatatgtttgccatgtacaaaaatctgacccgcgaatctacgggtgtgatcaccggtaaaggcgttggttttggtggctccctgatgcgcaccgaagcaacgggctatggtgctgtttacttcctgcagaacatgctggcggcccaaaatgaaagcatcgaaggcaaaaaagtgctggttagcggcgccggtaacgtgtctctgcatgcagctgaaaaagcgaccctgattggtgccatcgtgctgaccgttagtgattccaaaggcaccatttatgacgcgaaaggtctgaatcaggaaaaaatcgattggctgaaagttcagaaagaccaacacaaaccgctggcagattacgtcgaagtgtttggtggcgaatggatggctgaccagaaaccgtggagtattaaagcagatattgctatcccgtccgcgacgcagaacgaaatcaatgaagaagatgccaaactgctggttgacaacggcgtcaaatatattgtggaaggtgccaatatgccgctgaccgcagaagctattgattatatccgtctgcatcgtgtgcactacgcaccgggtaaagcagcaaacgcgggtggcgttgcagtcagcgccctggaaatgtcacagaattcggtccgtcagtatcaaacgttcgaacaggtggatgaacgcctgcaaggcattatgaaagatattcatgacagctctgcgcaggccagtgaaatgtacggccaaaccgatgaaggttatatcgactacatgtccggtgcgaacatggtcggcttcaaacgtgtcgcagacgcactggttgccttcggtatcctgaactaataagttgtaaatgcctgatggcgctacgcttatcaggcctacaaatgggcacaattcattgcagttacgctctaatgtaggccgggcaagcgcagcgcccggcggcggatccggcggcaggcctggcgctagatcaggttaaacataacttcgtatagcatacattatacgaagttattgttgacaattaatcatcggcatagtatatcggcatagtataatacgacaaggtgaggaactaaaccatggccaagcctttgtctcaagaagaatccaccctcattgaaagagcaacggctacaatcaacagcatccccatctctgaagactacagcgtcgccagcgcagctctctctagcgacggccgcatcttcactggtgtcaatgtatatcattttactgggggaccttgtgcagaactcgtggtgctgggcactgctgctgctgcggcagctggcaacctgacttgtatcgtcgcgatcggaaatgagaacaggggcatcttgagcccctgcggacggtgccgacaggtgcttctcgatctgcatcctgggatcaaagccatagtgaaggacagtgatggacagccgacggcagttgggattcgtgaattgctgccctctggttatgtgtgggagggctaaataacttcgtatagcatacattatacgaagttatagatcttaacgtcgacgccgccggatccgccgccccggcaaaatttcaggcgtttatgagtatttaacggatgatgctccccacggaacatttcttatgggccaacggcatttcttactgtagtgctcccaaaactgcttgtcgtaacgataacacgcttcaagttcagcatccgttaactttctgcgatagcagcagatatgccagtaaagaaatcccatttgactatttttttgataatcttcttcgctttcgaacaactcgtgcgcctttcgagaagcaagcattatataatgccaggccagttcttcttcaattgtcccgttttgaaaagctgtgcatttaaatatcggatcccgggcccgtcgactgcagaggcctgcatgcaagcttggcgtaatcatggtcatagctgtttcctgtgtgaaattgttatccgctcacaattccacacaacatacgagccggaagcataaagtgtaaagcctggggtgcctaatgagtgagctaactcacattaattgcgttgcgctcactgcccgctttccagtcgggaaacctgtcgtgccagctgcattaatgaatcggccaacgcgcggggagaggcggtttgcgtattgggcgctcttccgcttcctcgctcactgactcgctgcgctcggtcgttcggctgcggcgagcggtatcagctcactcaaaggcggtaatacggttatccacagaatcaggggataacgcaggaaagaacatgtgagcaaaaggccagcaaaaggccaggaaccgtaaaaaggccgcgttgctggcgtttttccataggctccgcccccctgacgagcatcacaaaaatcgacgctcaagtcagaggtggcgaaacccgacaggactataaagataccaggcgtttccccctggaagctccctcgtgcgctctcctgttccgaccctgccgcttaccggatacctgtccgcctttctcccttcgggaagcgtggcgctttctcatagctcacgctgtaggtatctcagttcggtgtaggtcgttcgctccaagctgggctgtgtgcacgaaccccccgttcagcccgaccgctgcgccttatccggtaactatcgtcttgagtccaacccggtaagacacgacttatcgccactggcagcagccactggtaacaggattagcagagcgaggtatgtaggcggtgctacagagttcttgaagtggtggcctaactacggctacactagaagaacagtatttggtatctgcgctctgctgaagccagttaccttcggaaaaagagttggtagctcttgatccggcaaacaaaccaccgctggtagcggtggtttttttgtttgcaagcagcagattacgcgcagaaaaaaaggatctcaagaagatcctttgatcttttctacggggtctgacgctcagtggaacgaaaactcacgttaagggattttggtcatgagattatcaaaaaggatcttcacctagatccttttaaattaaaaatgaagttttaaatcaatctaaagtatatatgagtaaacttggtctgacagttaccaatgcttaatcagtgaggcacctatctcagcgatctgtctatttcgttcatccatagttgcctgactccccgtcgtgtagataactacgatacgggagggcttaccatctggccccagtgctgcaatgataccgcgagacccacgctcaccggctccagatttatcagcaataaaccagccagccggaagggccgagcgcagaagtggtcctgcaactttatccgcctccatccagtctattaattgttgccgggaagctagagtaagtagttcgccagttaatagtttgcgcaacgttgttgccattgctacaggcatcgtggtgtcacgctcgtcgtttggtatggcttcattcagctccggttcccaacgatcaaggcgagttacatgatcccccatgttgtgcaaaaaagcggttagctccttcggtcctccgatcgttgtcagaagtaagttggccgcagtgttatcactcatggttatggcagcactgcataattctcttactgtcatgccatccgtaagatgcttttctgtgactggtgagtactcaaccaagtcattctgagaatagtgtatgcggcgaccgagttgctcttgcccggcgtcaatacgggataataccgcgccacatagcagaactttaaaagtgctcatcattggaaaacgttcttcggggcgaaaactctcaaggatcttaccgctgttgagatccagttcgatgtaacccactcgtgcacccaactgatcttcagcatcttttactttcaccagcgtttctgggtgagcaaaaacaggaaggcaaaatgccgcaaaaaagggaataagggcgacacggaaatgttgaatactcatactcttcctttttcaatattattgaagcatttatcagggttattgtctcatgagcggatacatatttgaatgtatttagaaaaataaacaaataggggttccgcgcacatttccccgaaaagtgccacctgacgtctaagaaaccattattatcatgacattaacctataaaaataggcgtatcacgaggccctttcgtctcgcgcgtttcggtgatgacggtgaaaacctctgacacatgcagctcccggagacggtcacagcttgtctgtaagcggatgccgggagcagacaagcccgtcagggcgcgtcagcgggtgttggcgggtgtcggggctggcttaactatgcggcatcagagcagattgtactgagagtgcaccatatgcggtgtgaaataccgcacagatgcgtaaggagaaaataccgcatcaggcgccattcgccattcaggctgcgcaactgttgggaagggcgatcggtgcgggcctcttcgctattacgccagctggcgaaagggggatgtgctgcaaggcgattaagttgggtaacgccagggttttcccagtcacgacgttgtaaaacgacggccagtgaattcgagctcggtacctcgcgaatgcatctagat

SEQ ID NO: 192 - DNA, 4092 bp, Artificial Sequence
  Description of Artificial Sequence: Synthetic pUC57_Ptrc-StMCR polynucleotide
ctagatataatttaaatgcggccgcttattatttttcaatgtaacctttttcaaccagcagttcagcagccaggatgccaccgcccgccgcaccgcgaacggtattgtgaatcagagacaccaggcggatcatacgtttgttcacctgtttcagacggcccacgacaacgctcatacccggaatgtcgccagcccagcgatcaaagtacacttgcggacgcgtatcttcattcatgacgataatcggtttggacggtgcggtcggcagtttcagatcctgcggttcaccgcggaagttttccagcgtttctttcactttttcagctgcggtttcttctttaaaactaacgtacagcacttcatagtggccatgaatggtggcgatacgatgcgtggtggccgccagcgaaacgtcttccagtttcggttcatcgacattgcgtttaacttctgacagaatacggaagatttctttaatggttttcgcgtcataaccatcgcccagcggcagaatgttgtccacgacatccagagacgggatacccgggtaacctgcaccggacagactctggatcgtggtaatgaacgcgccgtccattttgtaatctttgaagatagcacccagcgggatagctgcaccttgtgccgtgcacagcggcgtggtaacaataaaacctttccattcgcgacgtttgcgctgttcatcgatcagactaatggtgtgcggattcagttccggcaccagcagcgggacgtccggatcgaaacgatgatccggagagttgctgatgaccgggaagccttcttttgcaaattgttcttcaaccggaccggccgcaccctgcggcagcggcgaaaagataatatccacgtcatccatcagtttcgggtccgtcggtttaatttccatatcggcgatttctttcgggacttggccaacggtctgccaacgaaccacttcaccgtacggtttgccaactgaacctttgccggccagatacgccggtttgatatacggatgatttgacagcatacggacatattcgataccaaccaggccggtggcgcccaggatagccgctttcagggtgcgacgcatcaattgtttcctgtgtgaaattgttatccgctcacaattccacacattatacgagccggatgattaattgtcaacagctcatttcagaatatttgccagaaccgttatgatgtcggcgcaaaaaacattatccagaacgggagtgcgccttgagcgacacgaattatgcagtgatttacgacctgcacagccataccacagcttccgatggctgcctgacgccagaagcattggtgcaccgtgcagtcgatgataagctgtcaaaccgctagcatttaaatattgggtcatcggatcccgggcccgtcgactgcagaggcctgcatgcaagcttggcgtaatcatggtcatagctgtttcctgtgtgaaattgttatccgctcacaattccacacaacatacgagccggaagcataaagtgtaaagcctggggtgcctaatgagtgagctaactcacattaattgcgttgcgctcactgcccgctttccagtcgggaaacctgtcgtgccagctgcattaatgaatcggccaacgcgcggggagaggcggtttgcgtattgggcgctcttccgcttcctcgctcactgactcgctgcgctcggtcgttcggctgcggcgagcggtatcagctcactcaaaggcggtaatacggttatccacagaatcaggggataacgcaggaaagaacatgtgagcaaaaggccagcaaaaggccaggaaccgtaaaaaggccgcgttgctggcgtttttccataggctccgcccccctgacgagcatcacaaaaatcgacgctcaagtcagaggtggcgaaacccgacaggactataaagataccaggcgtttccccctggaagctccctcgtgcgctctcctgttccgaccctgccgcttaccggatacctgtccgcctttctcccttcgggaagcgtggcgctttctcatagctcacgctgtaggtatctcagttcggtgtaggtcgttcgctccaagctgggctgtgtgcacgaaccccccgttcagcccgaccgctgcgccttatccggtaactatcgtcttgagtccaacccggtaagacacgacttatcgccactggcagcagccactggtaacaggattagcagagcgaggtatgtaggcggtgctacagagttcttgaagtggtggcctaactacggctacactagaagaacagtatttggtatctgcgctctgctgaagccagttaccttcggaaaaagagttggtagctcttgatccggcaaacaaaccaccgctggtagcggtggtttttttgtttgcaagcagcagattacgcgcagaaaaaaaggatctcaagaagatcctttgatcttttctacggggtctgacgctcagtggaacgaaaactcacgttaagggattttggtcatgagattatcaaaaaggatcttcacctagatccttttaaattaaaaatgaagttttaaatcaatctaaagtatatatgagtaaacttggtctgacagttaccaatgcttaatcagtgaggcacctatctcagcgatctgtctatttcgttcatccatagttgcctgactccccgtcgtgtagataactacgatacgggagggcttaccatctggccccagtgctgcaatgataccgcgagacccacgctcaccggctccagatttatcagcaataaaccagccagccggaagggccgagcgcagaagtggtcctgcaactttatccgcctccatccagtctattaattgttgccgggaagctagagtaagtagttcgccagttaatagtttgcgcaacgttgttgccattgctacaggcatcgtggtgtcacgctcgtcgtttggtatggcttcattcagctccggttcccaacgatcaaggcgagttacatgatcccccatgttgtgcaaaaaagcggttagctccttcggtcctccgatcgttgtcagaagtaagttggccgcagtgttatcactcatggttatggcagcactgcataattctcttactgtcatgccatccgtaagatgcttttctgtgactggtgagtactcaaccaagtcattctgagaatagtgtatgcggcgaccgagttgctcttgcccggcgtcaatacgggataataccgcgccacatagcagaactttaaaagtgctcatcattggaaaacgttcttcggggcgaaaactctcaaggatcttaccgctgttgagatccagttcgatgtaacccactcgtgcacccaactgatcttcagcatcttttactttcaccagcgtttctgggtgagcaaaaacaggaaggcaaaatgccgcaaaaaagggaataagggcgacacggaaatgttgaatactcatactcttcctttttcaatattattgaagcatttatcagggttattgtctcatgagcggatacatatttgaatgtatttagaaaaataaacaaataggggttccgcgcacatttccccgaaaagtgccacctgacgtctaagaaaccattattatcatgacattaacctataaaaataggcgtatcacgaggccctttcgtctcgcgcgtttcggtgatgacggtgaaaacctctgacacatgcagctcccggagacggtcacagcttgtctgtaagcggatgccgggagcagacaagcccgtcagggcgcgtcagcgggtgttggcgggtgtcggggctggcttaactatgcggcatcagagcagattgtactgagagtgcaccatatgcggtgtgaaataccgcacagatgcgtaaggagaaaataccgcatcaggcgccattcgccattcaggctgcgcaactgttgggaagggcgatcggtgcgggcctcttcgctattacgccagctggcgaaagggggatgtgctgcaaggcgattaagttgggtaacgccagggttttcccagtcacgacgttgtaaaacgacggccagtgaattcgagctcggtacctcgcgaatgcat

SEQ ID NO: 193 - DNA, 4008 bp, Artificial Sequence
  Description of Artificial Sequence: Synthetic pACYC duet polynucleotide
ggggaattgtgagcggataacaattcccctgtagaaataattttgtttaactttaataaggagatataccatgggcagcagccatcaccatcatcaccacagccaggatccgaattcgagctcggcgcgcctgcaggtcgacaagcttgcggccgcataatgcttaagtcgaacagaaagtaatcgtattgtacacggccgcataatcgaaattaatacgactcactataggggaattgtgagcggataacaattccccatcttagtatattagttaagtataagaaggagatatacatatggcagatctcaattggatatcggccggccacgcgatcgctgacgtcggtaccctcgagtctggtaaagaaaccgctgctgcgaaatttgaacgccagcacatggactcgtctactagcgcagcttaattaacctaggctgctgccaccgctgagcaataactagcataaccccttggggcctctaaacgggtcttgaggggttttttgctgaaacctcaggcatttgagaagcacacggtcacactgcttccggtagtcaataaaccggtaaaccagcaatagacataagcggctatttaacgaccctgccctgaaccgacgaccgggtcgaatttgctttcgaatttctgccattcatccgcttattatcacttattcaggcgtagcaccaggcgtttaagggcaccaataactgccttaaaaaaattacgccccgccctgccactcatcgcagtactgttgtaattcattaagcattctgccgacatggaagccatcacagacggcatgatgaacctgaatcgccagcggcatcagcaccttgtcgccttgcgtataatatttgcccatagtgaaaacgggggcgaagaagttgtccatattggccacgtttaaatcaaaactggtgaaactcacccagggattggctgagacgaaaaacatattctcaataaaccctttagggaaataggccaggttttcaccgtaacacgccacatcttgcgaatatatgtgtagaaactgccggaaatcgtcgtggtattcactccagagcgatgaaaacgtttcagtttgctcatggaaaacggtgtaacaagggtgaacactatcccatatcaccagctcaccgtctttcattgccatacggaactccggatgagcattcatcaggcgggcaagaatgtgaataaaggccggataaaacttgtgcttatttttctttacggtctttaaaaaggccgtaatatccagctgaacggtctggttataggtacattgagcaactgactgaaatgcctcaaaatgttctttacgatgccattgggatatatcaacggtggtatatccagtgatttttttctccattttagcttccttagctcctgaaaatctcgataactcaaaaaatacgcccggtagtgatcttatttcattatggtgaaagttggaacctcttacgtgccgatcaacgtctcattttcgccaaaagttggcccagggcttcccggtatcaacagggacaccaggatttatttattctgcgaagtgatcttccgtcacaggtatttattcggcgcaaagtgcgtcgggtgatgctgccaacttactgatttagtgtatgatggtgtttttgaggtgctccagtggcttctgtttctatcagctgtccctcctgttcagctactgacggggtggtgcgtaacggcaaaagcaccgccggacatcagcgctagcggagtgtatactggcttactatgttggcactgatgagggtgtcagtgaagtgcttcatgtggcaggagaaaaaaggctgcaccggtgcgtcagcagaatatgtgatacaggatatattccgcttcctcgctcactgactcgctacgctcggtcgttcgactgcggcgagcggaaatggcttacgaacggggcggagatttcctggaagatgccaggaagatacttaacagggaagtgagagggccgcggcaaagccgtttttccataggctccgcccccctgacaagcatcacgaaatctgacgctcaaatcagtggtggcgaaacccgacaggactataaagataccaggcgtttcccctggcggctccctcgtgcgctctcctgttcctgcctttcggtttaccggtgtcattccgctgttatggccgcgtttgtctcattccacgcctgacactcagttccgggtaggcagttcgctccaagctggactgtatgcacgaaccccccgttcagtccgaccgctgcgccttatccggtaactatcgtcttgagtccaacccggaaagacatgcaaaagcaccactggcagcagccactggtaattgatttagaggagttagtcttgaagtcatgcgccggttaaggctaaactgaaaggacaagttttggtgactgcgctcctccaagccagttacctcggttcaaagagttggtagctcagagaaccttcgaaaaaccgccctgcaaggcggttttttcgttttcagagcaagagattacgcgcagaccaaaacgatctcaagaagatcatcttattaatcagataaaatatttctagatttcagtgcaatttatctcttcaaatgtagcacctgaagtcagccccatacgatataagttgtaattctcatgttagtcatgccccgcgcccaccggaaggagctgactgggttgaaggctctcaagggcatcggtcgagatcccggtgcctaatgagtgagctaacttacattaattgcgttgcgctcactgcccgctttccagtcgggaaacctgtcgtgccagctgcattaatgaatcggccaacgcgcggggagaggcggtttgcgtattgggcgccagggtggtttttcttttcaccagtgagacgggcaacagctgattgcccttcaccgcctggccctgagagagttgcagcaagcggtccacgctggtttgccccagcaggcgaaaatcctgtttgatggtggttaacggcgggatataacatgagctgtcttcggtatcgtcgtatcccactaccgagatgtccgcaccaacgcgcagcccggactcggtaatggcgcgcattgcgcccagcgccatctgatcgttggcaaccagcatcgcagtgggaacgatgccctcattcagcatttgcatggtttgttgaaaaccggacatggcactccagtcgccttcccgttccgctatcggctgaatttgattgcgagtgagatatttatgccagccagccagacgcagacgcgccgagacagaacttaatgggcccgctaacagcgcgatttgctggtgacccaatgcgaccagatgctccacgcccagtcgcgtaccgtcttcatgggagaaaataatactgttgatgggtgtctggtcagagacatcaagaaataacgccggaacattagtgcaggcagcttccacagcaatggcatcctggtcatccagcggatagttaatgatcagcccactgacgcgttgcgcgagaagattgtgcaccgccgctttacaggcttcgacgccgcttcgttctaccatcgacaccaccacgctggcacccagttgatcggcgcgagatttaatcgccgcgacaatttgcgacggcgcgtgcagggccagactggaggtggcaacgccaatcagcaacgactgtttgcccgccagttgttgtgccacgcggttgggaatgtaattcagctccgccatcgccgcttccactttttcccgcgttttcgcagaaacgtggctggcctggttcaccacgcgggaaacggtctgataagagacaccggcatactctgcgacatcgtataacgttactggtttcacattcaccaccctgaattgactctcttccgggcgctatcatgccataccgcgaaaggttttgcgccattcgatggtgtccgggatctcgacgctctcccttatgcgactcctgcattaggaaattaatacgactcactata

SEQ ID NO: 194 - DNA, 5944 bp, Artificial Sequence
  Description of Artificial Sequence: Synthetic pET28b::mAID  polynucleotide
atccggatatagttcctcctttcagcaaaaaacccctcaagacccgtttagaggccccaaggggttatgctagttattgctcagcggtggcagcagccaactcagcttcctttcgggctttgttagcagccggatctcagtggtggtggtggtggtgctcgagtgcggccgcaagcttgtcgacggagctcgaattggatccctatcagtggtggtggtggtggtggtggtggtggtggggcccctggaacagaacttccagccctccgcctccaaatcccaacatacgaaatgcatctcgcaagtcatcgacttcgtacaagggcaaaaggatgcgccgaagttgtctggttagccggacagaattttcatgtagcccttcccaggctttgaaagttctttcacgattttctacaaatgtattccagcagtaaaaatagtctttgaaggtcatgatcccgatctggaccccagcgcggtgcagtctccgcagcccctcaggctcagccttgcggtcttcacagaagtagaggcgcgcggtgaaaatcctcaggctgaggttagggttccatctcagaaactcagccacgtgccgggcacagtcatagcacgggctccaggaggtgaaccaggtgacgcggtaacaccggcccgggtccaggtcccagtctgagatgtagcgtaggaacaacaattccacgtggcagccagacttgttgcgaaggtggccgaagtccagtgagcaggaggtggcactatctctcctcttcaccacgtagcagaggtaggtctcatgccgtcccttggcccagcggacatttttgaaatggtaaagaaacttcttttgcttcatcagaaggctgtccattcccatggtatatctccttcttaaagttaaacaaaattatttctagaggggaattgttatccgctcacaattcccctatagtgagtcgtattaatttcgcgggatcgagatctcgatcctctacgccggacgcatcgtggccggcatcaccggcgccacaggtgcggttgctggcgcctatatcgccgacatcaccgatggggaagatcgggctcgccacttcgggctcatgagcgcttgtttcggcgtgggtatggtggcaggccccgtggccgggggactgttgggcgccatctccttgcatgcaccattccttgcggcggcggtgctcaacggcctcaacctactactgggctgcttcctaatgcaggagtcgcataagggagagcgtcgagatcccggacaccatcgaatggcgcaaaacctttcgcggtatggcatgatagcgcccggaagagagtcaattcagggtggtgaatgtgaaaccagtaacgttatacgatgtcgcagagtatgccggtgtctcttatcagaccgtttcccgcgtggtgaaccaggccagccacgtttctgcgaaaacgcgggaaaaagtggaagcggcgatggcggagctgaattacattcccaaccgcgtggcacaacaactggcgggcaaacagtcgttgctgattggcgttgccacctccagtctggccctgcacgcgccgtcgcaaattgtcgcggcgattaaatctcgcgccgatcaactgggtgccagcgtggtggtgtcgatggtagaacgaagcggcgtcgaagcctgtaaagcggcggtgcacaatcttctcgcgcaacgcgtcagtgggctgatcattaactatccgctggatgaccaggatgccattgctgtggaagctgcctgcactaatgttccggcgttatttcttgatgtctctgaccagacacccatcaacagtattattttctcccatgaagacggtacgcgactgggcgtggagcatctggtcgcattgggtcaccagcaaatcgcgctgttagcgggcccattaagttctgtctcggcgcgtctgcgtctggctggctggcataaatatctcactcgcaatcaaattcagccgatagcggaacgggaaggcgactggagtgccatgtccggttttcaacaaaccatgcaaatgctgaatgagggcatcgttcccactgcgatgctggttgccaacgatcagatggcgctgggcgcaatgcgcgccattaccgagtccgggctgcgcgttggtgcggatatctcggtagtgggatacgacgataccgaagacagctcatgttatatcccgccgttaaccaccatcaaacaggattttcgcctgctggggcaaaccagcgtggaccgcttgctgcaactctctcagggccaggcggtgaagggcaatcagctgttgcccgtctcactggtgaaaagaaaaaccaccctggcgcccaatacgcaaaccgcctctccccgcgcgttggccgattcattaatgcagctggcacgacaggtttcccgactggaaagcgggcagtgagcgcaacgcaattaatgtaagttagctcactcattaggcaccgggatctcgaccgatgcccttgagagccttcaacccagtcagctccttccggtgggcgcggggcatgactatcgtcgccgcacttatgactgtcttctttatcatgcaactcgtaggacaggtgccggcagcgctctgggtcattttcggcgaggaccgctttcgctggagcgcgacgatgatcggcctgtcgcttgcggtattcggaatcttgcacgccctcgctcaagccttcgtcactggtcccgccaccaaacgtttcggcgagaagcaggccattatcgccggcatggcggccccacgggtgcgcatgatcgtgctcctgtcgttgaggacccggctaggctggcggggttgccttactggttagcagaatgaatcaccgatacgcgagcgaacgtgaagcgactgctgctgcaaaacgtctgcgacctgagcaacaacatgaatggtcttcggtttccgtgtttcgtaaagtctggaaacgcggaagtcagcgccctgcaccattatgttccggatctgcatcgcaggatgctgctggctaccctgtggaacacctacatctgtattaacgaagcgctggcattgaccctgagtgatttttctctggtcccgccgcatccataccgccagttgtttaccctcacaacgttccagtaaccgggcatgttcatcatcagtaacccgtatcgtgagcatcctctctcgtttcatcggtatcattacccccatgaacagaaatcccccttacacggaggcatcagtgaccaaacaggaaaaaaccgcccttaacatggcccgctttatcagaagccagacattaacgcttctggagaaactcaacgagctggacgcggatgaacaggcagacatctgtgaatcgcttcacgaccacgctgatgagctttaccgcagctgcctcgcgcgtttcggtgatgacggtgaaaacctctgacacatgcagctcccggagacggtcacagcttgtctgtaagcggatgccgggagcagacaagcccgtcagggcgcgtcagcgggtgttggcgggtgtcggggcgcagccatgacccagtcacgtagcgatagcggagtgtatactggcttaactatgcggcatcagagcagattgtactgagagtgcaccatatatgcggtgtgaaataccgcacagatgcgtaaggagaaaataccgcatcaggcgctcttccgcttcctcgctcactgactcgctgcgctcggtcgttcggctgcggcgagcggtatcagctcactcaaaggcggtaatacggttatccacagaatcaggggataacgcaggaaagaacatgtgagcaaaaggccagcaaaaggccaggaaccgtaaaaaggccgcgttgctggcgtttttccataggctccgcccccctgacgagcatcacaaaaatcgacgctcaagtcagaggtggcgaaacccgacaggactataaagataccaggcgtttccccctggaagctccctcgtgcgctctcctgttccgaccctgccgcttaccggatacctgtccgcctttctcccttcgggaagcgtggcgctttctcatagctcacgctgtaggtatctcagttcggtgtaggtcgttcgctccaagctgggctgtgtgcacgaaccccccgttcagcccgaccgctgcgccttatccggtaactatcgtcttgagtccaacccggtaagacacgacttatcgccactggcagcagccactggtaacaggattagcagagcgaggtatgtaggcggtgctacagagttcttgaagtggtggcctaactacggctacactagaaggacagtatttggtatctgcgctctgctgaagccagttaccttcggaaaaagagttggtagctcttgatccggcaaacaaaccaccgctggtagcggtggtttttttgtttgcaagcagcagattacgcgcagaaaaaaaggatctcaagaagatcctttgatcttttctacggggtctgacgctcagtggaacgaaaactcacgttaagggattttggtcatgaacaataaaactgtctgcttacataaacagtaatacaaggggtgttatgagccatattcaacgggaaacgtcttgctctaggccgcgattaaattccaacatggatgctgatttatatgggtataaatgggctcgcgataatgtcgggcaatcaggtgcgacaatctatcgattgtatgggaagcccgatgcgccagagttgtttctgaaacatggcaaaggtagcgttgccaatgatgttacagatgagatggtcagactaaactggctgacggaatttatgcctcttccgaccatcaagcattttatccgtactcctgatgatgcatggttactcaccactgcgatccccgggaaaacagcattccaggtattagaagaatatcctgattcaggtgaaaatattgttgatgcgctggcagtgttcctgcgccggttgcattcgattcctgtttgtaattgtccttttaacagcgatcgcgtatttcgtctcgctcaggcgcaatcacgaatgaataacggtttggttgatgcgagtgattttgatgacgagcgtaatggctggcctgttgaacaagtctggaaagaaatgcataaacttttgccattctcaccggattcagtcgtcactcatggtgatttctcacttgataaccttatttttgacgaggggaaattaataggttgtattgatgttggacgagtcggaatcgcagaccgataccaggatcttgccatcctatggaactgcctcggtgagttttctccttcattacagaaacggctttttcaaaaatatggtattgataatcctgatatgaataaattgcagtttcatttgatgctcgatgagtttttctaagaattaattcatgagcggatacatatttgaatgtatttagaaaaataaacaaataggggttccgcgcacatttccccgaaaagtgccacctgaaattgtaaacgttaatattttgttaaaattcgcgttaaatttttgttaaatcagctcattttttaaccaataggccgaaatcggcaaaatcccttataaatcaaaagaatagaccgagatagggttgagtgttgttccagtttggaacaagagtccactattaaagaacgtggactccaacgtcaaagggcgaaaaaccgtctatcagggcgatggcccactacgtgaaccatcaccctaatcaagttttttggggtcgaggtgccgtaaagcactaaatcggaaccctaaagggagcccccgatttagagcttgacggggaaagccggcgaacgtggcgagaaaggaagggaagaaagcgaaaggagcgggcgctagggcgctggcaagtgtagcggtcacgctgcgcgtaaccaccacacccgccgcgcttaatgcgccgctacagggcgcgtcccattcgcca

SEQ ID NO: 195 - DNA, 7868 bp, Artificial Sequence
  Description of Artificial Sequence: Synthetic pACYC-T7-phaA-hbd-crt-ter polynucleotide
atcggccggccacgcgatcgctgacgtcggtaccctcgagtctggtaaagaaaccgctgctgcgaaatttgaacgccagcacatggactcgtctactagcgcagcttaattaacctaggctgctgccaccgctgagcaataactagcataaccccttggggcctctaaacgggtcttgaggggttttttgctgaaacctcaggcatttgagaagcacacggtcacactgcttccggtagtcaataaaccggtaaaccagcaatagacataagcggctatttaacgaccctgccctgaaccgacgaccgggtcgaatttgctttcgaatttctgccattcatccgcttattatcacttattcaggcgtagcaccaggcgtttaagggcaccaataactgccttaaaaaaattacgccccgccctgccactcatcgcagtactgttgtaattcattaagcattctgccgacatggaagccatcacagacggcatgatgaacctgaatcgccagcggcatcagcaccttgtcgccttgcgtataatatttgcccatagtgaaaacgggggcgaagaagttgtccatattggccacgtttaaatcaaaactggtgaaactcacccagggattggctgagacgaaaaacatattctcaataaaccctttagggaaataggccaggttttcaccgtaacacgccacatcttgcgaatatatgtgtagaaactgccggaaatcgtcgtggtattcactccagagcgatgaaaacgtttcagtttgctcatggaaaacggtgtaacaagggtgaacactatcccatatcaccagctcaccgtctttcattgccatacggaactccggatgagcattcatcaggcgggcaagaatgtgaataaaggccggataaaacttgtgcttatttttctttacggtctttaaaaaggccgtaatatccagctgaacggtctggttataggtacattgagcaactgactgaaatgcctcaaaatgttctttacgatgccattgggatatatcaacggtggtatatccagtgatttttttctccattttagcttccttagctcctgaaaatctcgataactcaaaaaatacgcccggtagtgatcttatttcattatggtgaaagttggaacctcttacgtgccgatcaacgtctcattttcgccaaaagttggcccagggcttcccggtatcaacagggacaccaggatttatttattctgcgaagtgatcttccgtcacaggtatttattcggcgcaaagtgcgtcgggtgatgctgccaacttactgatttagtgtatgatggtgtttttgaggtgctccagtggcttctgtttctatcagctgtccctcctgttcagctactgacggggtggtgcgtaacggcaaaagcaccgccggacatcagcgctagcggagtgtatactggcttactatgttggcactgatgagggtgtcagtgaagtgcttcatgtggcaggagaaaaaaggctgcaccggtgcgtcagcagaatatgtgatacaggatatattccgcttcctcgctcactgactcgctacgctcggtcgttcgactgcggcgagcggaaatggcttacgaacggggcggagatttcctggaagatgccaggaagatacttaacagggaagtgagagggccgcggcaaagccgtttttccataggctccgcccccctgacaagcatcacgaaatctgacgctcaaatcagtggtggcgaaacccgacaggactataaagataccaggcgtttcccctggcggctccctcgtgcgctctcctgttcctgcctttcggtttaccggtgtcattccgctgttatggccgcgtttgtctcattccacgcctgacactcagttccgggtaggcagttcgctccaagctggactgtatgcacgaaccccccgttcagtccgaccgctgcgccttatccggtaactatcgtcttgagtccaacccggaaagacatgcaaaagcaccactggcagcagccactggtaattgatttagaggagttagtcttgaagtcatgcgccggttaaggctaaactgaaaggacaagttttggtgactgcgctcctccaagccagttacctcggttcaaagagttggtagctcagagaaccttcgaaaaaccgccctgcaaggcggttttttcgttttcagagcaagagattacgcgcagaccaaaacgatctcaagaagatcatcttattaatcagataaaatatttctagatttcagtgcaatttatctcttcaaatgtagcacctgaagtcagccccatacgatataagttgtaattctcatgttagtcatgccccgcgcccaccggaaggagctgactgggttgaaggctctcaagggcatcggtcgagatcccggtgcctaatgagtgagctaacttacattaattgcgttgcgctcactgcccgctttccagtcgggaaacctgtcgtgccagctgcattaatgaatcggccaacgcgcggggagaggcggtttgcgtattgggcgccagggtggtttttcttttcaccagtgagacgggcaacagctgattgcccttcaccgcctggccctgagagagttgcagcaagcggtccacgctggtttgccccagcaggcgaaaatcctgtttgatggtggttaacggcgggatataacatgagctgtcttcggtatcgtcgtatcccactaccgagatgtccgcaccaacgcgcagcccggactcggtaatggcgcgcattgcgcccagcgccatctgatcgttggcaaccagcatcgcagtgggaacgatgccctcattcagcatttgcatggtttgttgaaaaccggacatggcactccagtcgccttcccgttccgctatcggctgaatttgattgcgagtgagatatttatgccagccagccagacgcagacgcgccgagacagaacttaatgggcccgctaacagcgcgatttgctggtgacccaatgcgaccagatgctccacgcccagtcgcgtaccgtcttcatgggagaaaataatactgttgatgggtgtctggtcagagacatcaagaaataacgccggaacattagtgcaggcagcttccacagcaatggcatcctggtcatccagcggatagttaatgatcagcccactgacgcgttgcgcgagaagattgtgcaccgccgctttacaggcttcgacgccgcttcgttctaccatcgacaccaccacgctggcacccagttgatcggcgcgagatttaatcgccgcgacaatttgcgacggcgcgtgcagggccagactggaggtggcaacgccaatcagcaacgactgtttgcccgccagttgttgtgccacgcggttgggaatgtaattcagctccgccatcgccgcttccactttttcccgcgttttcgcagaaacgtggctggcctggttcaccacgcgggaaacggtctgataagagacaccggcatactctgcgacatcgtataacgttactggtttcacattcaccaccctgaattgactctcttccgggcgctatcatgccataccgcgaaaggttttgcgccattcgatggtgtccgggatctcgacgctctcccttatgcgactcctgcattaggaaattaatacgactcactataggggaattgtgagcggataacaattcccctgtagaaataattttgtttaactttaataaggagatatacaggaggaaaaaccatggtcatcgtcagcgcggctcgtacggctgttggcagcttcaatggcgcgttcgcaagcaccccagctcacgatctgggtgccgcggtgattgaggcggtcgttgcgcgtgcgggtattgataaagcggatgtcagcgaaaccattctgggtcaggttctgacggctggccagggtcagaatcctgcccgtcaagcgcacattaaggcaggtctgccgcaagaaagcgctgcctggtccatcaaccaggtgtgtggtagcggtctgcgtgcagtcgctctggctgcccagcatgtccaactgggtgacgcgtcgattgtggtggcgggtggtcaggagaatatgagcctgagcccgcatgtggcacatttgcgtgcaggccagaagatgggtgatctgtcgttcattgacagcatgattaaggatggtctgtgggatgccttcaatggttaccacatgggccaaactgcggaaaatgttgcggcgaaatggcaaatctcccgcgacatgcaggatgaatttgcagtcgcctctcaaaacaaagccgaggccgcacaaaaagcgggtcgttttgcagacgaaattgtcccgtttgtgattaagacccgtaaaggtgatgttacggtggatgcagatgagtatatccgccacggcgcgaccctggatgcaatggctaagctgcgcccagcgttcatcaaggacggtactgtgaccgcggcaaatgcatcgggcatcaatgacggtgccgctgcggtgctggtgatgagcgcggaagaggctgagaagcgcggtttgagcccgctggcgcgtattgcaagctatgccaccgcgggtctggacccgtcgattatgggcgtcggtccgattcacgccagccgcaaagcgctggaaaaggcaggttggaaagttggtgatctggacctggtcgaggcaaacgaggcgttcgccgctcaagcctgtgccgtgaataaggatatgggttgggacccgagcatcgttaatgtgaatggtggtgcaatcgcgatcggccatccgatcggcgcaagcggtgcacgcgttctgaacacgctgctgtttgaaatgcagcgccgcaatgcgaagaaaggtttggctaccctgtgcattggcggtggtatgggtgtcgccatgtgcctggagcgtccgtagtaacacatctgcagcgtcggatacgaggaggaataaaccatgaaaaaggtatgtgttataggtgcaggtactatgggttcaggaattgctcaggcatttgcagctaaaggatttgaagtagtattaagagatattaaagatgaatttgttgatagaggattagattttatcaataaaaatctttctaaattagttaaaaaaggaaagatagaagaagctactaaagttgaaatcttaactagaatttccggaacagttgaccttaatatggcagctgattgcgatttagttatagaagcagctgttgaaagaatggatattaaaaagcagatttttgctgacttagacaatatatgcaagccagaaacaattcttgcatcaaatacatcatcactttcaataacagaagtggcatcagcaactaaaagacctgataaggttataggtatgcatttctttaatccagctcctgttatgaagcttgtagaggtaataagaggaatagctacatcacaagaaacttttgatgcagttaaagagacatctatagcaataggaaaagatcctgtagaagtagcagaagcaccaggatttgttgtaaatagaatattaataccaatgattaatgaagcagttggtatattagcagaaggaatagcttcagtagaagacatagataaagctatgaaacttggagctaatcacccaatgggaccattagaattaggtgattttataggtcttgatatatgtcttgctataatggatgttttatactcagaaactggagattctaagtatagaccacatacattacttaagaagtatgtaagagcaggatggcttggaagaaaatcaggaaaaggtttctacgattattcaaaataagtttacaggatctgcagggaggaggaaatcatggagttgaacaacgttattctggagaaagaaggcaaggtggcggttgtcaccattaaccgtccaaaggccctgaacgctctgaactcggataccctgaaagagatggattacgttattggcgagattgagaatgacagcgaagtgctggctgtgattctgaccggtgcgggtgagaagagctttgtcgcgggtgcggacatcagcgagatgaaagaaatgaacaccatcgaaggccgtaagttcggtattctgggcaacaaggtgtttcgtcgtctggaactgctggagaaacctgtcattgctgccgtgaacggtttcgcgctgggcggtggttgcgagatcgctatgagctgcgatattcgtatcgcatcgtccaacgcacgctttggtcaaccggaggtcggtctgggtatcactccgggtttcggcggtacgcaacgtctgagccgcctggttggcatgggcatggcgaaacagttgattttcacggcacagaacattaaggcggatgaggcgctgcgtattggtctggtgaataaggtcgttgagccaagcgaactgatgaataccgcgaaagaaattgcgaacaagatcgttagcaatgccccggtggccgttaagctgtcgaaacaggcaatcaaccgtggcatgcagtgtgacatcgacaccgccctggcgtttgagagcgaggcgtttggtgagtgcttctccaccgaggaccaaaaggatgcgatgaccgcgttcattgagaaacgcaagatcgagggtttcaagaatcgttaatagaggaggataggaggttttcatatgattgtgaaaccgatggtccgtaataatatctgtctgaatgctcacccgcagggctgtaaaaaaggcgtggaagatcaaattgaatataccaaaaaacgtattacggcagaagtgaaagccggcgcaaaagctccgaaaaacgtgctggttctgggttgcagcaatggctatggtctggcttctcgcattaccgcggcctttggctacggtgcagctacgatcggcgttagtttcgaaaaagcaggttccgaaaccaaatatggcacgccgggttggtacaacaatctggcttttgatgaagcggccaaacgtgaaggcctgtatagtgtcaccattgatggtgacgcgttctccgatgaaattaaagcacaggtgatcgaagaagcgaagaaaaaaggcattaaatttgacctgatcgtttacagcctggcatctccggtccgtaccgatccggacacgggtatcatgcataaatctgtgctgaaaccgtttggcaaaaccttcacgggtaaaaccgttgatccgttcacgggcgaactgaaagaaattagcgcggaaccggccaacgatgaagaagcagctgcgaccgtcaaagtgatgggcggtgaagactgggaacgttggatcaaacagctgagtaaagaaggcctgctggaagaaggttgcattaccctggcgtattcctacatcggcccggaagcaacccaagctctgtatcgcaaaggcacgattggtaaagcgaaagaacatctggaagcgaccgcccaccgtctgaacaaagaaaatccgtcaatccgcgccttcgtttcggtcaataaaggtctggttacccgtgcatcagctgtgattccggttatcccgctgtacctggcatcgctgtttaaagtcatgaaagaaaaaggcaaccatgaaggttgtattgaacagatcacccgcctgtatgccgaacgtctgtaccgcaaagatggtacgattccggtggacgaagaaaatcgtattcgcatcgatgactgggaactggaagaagatgtccaaaaagccgtgagcgccctgatggaaaaagttaccggcgaaaacgcggaatctctgacggatctggccggttatcgtcacgactttctggcgagtaatggttttgatgttgaaggcattaactacgaagctgaagtggaacgctttgatcgcatttgatctagaat

SEQ ID NO: 196 - DNA, 7687 bp, Artificial Sequence
  Description of Artificial Sequence: Synthetic pACYC-T7-nphT07_hbd_crt_ter polynucleotide
cgctgacgtcggtaccctcgagtctggtaaagaaaccgctgctgcgaaatttgaacgccagcacatggactcgtctactagcgcagcttaattaacctaggctgctgccaccgctgagcaataactagcataaccccttggggcctctaaacgggtcttgaggggttttttgctgaaacctcaggcatttgagaagcacacggtcacactgcttccggtagtcaataaaccggtaaaccagcaatagacataagcggctatttaacgaccctgccctgaaccgacgaccgggtcgaatttgctttcgaatttctgccattcatccgcttattatcacttattcaggcgtagcaccaggcgtttaagggcaccaataactgccttaaaaaaattacgccccgccctgccactcatcgcagtactgttgtaattcattaagcattctgccgacatggaagccatcacagacggcatgatgaacctgaatcgccagcggcatcagcaccttgtcgccttgcgtataatatttgcccatagtgaaaacgggggcgaagaagttgtccatattggccacgtttaaatcaaaactggtgaaactcacccagggattggctgagacgaaaaacatattctcaataaaccctttagggaaataggccaggttttcaccgtaacacgccacatcttgcgaatatatgtgtagaaactgccggaaatcgtcgtggtattcactccagagcgatgaaaacgtttcagtttgctcatggaaaacggtgtaacaagggtgaacactatcccatatcaccagctcaccgtctttcattgccatacggaactccggatgagcattcatcaggcgggcaagaatgtgaataaaggccggataaaacttgtgcttatttttctttacggtctttaaaaaggccgtaatatccagctgaacggtctggttataggtacattgagcaactgactgaaatgcctcaaaatgttctttacgatgccattgggatatatcaacggtggtatatccagtgatttttttctccattttagcttccttagctcctgaaaatctcgataactcaaaaaatacgcccggtagtgatcttatttcattatggtgaaagttggaacctcttacgtgccgatcaacgtctcattttcgccaaaagttggcccagggcttcccggtatcaacagggacaccaggatttatttattctgcgaagtgatcttccgtcacaggtatttattcggcgcaaagtgcgtcgggtgatgctgccaacttactgatttagtgtatgatggtgtttttgaggtgctccagtggcttctgtttctatcagctgtccctcctgttcagctactgacggggtggtgcgtaacggcaaaagcaccgccggacatcagcgctagcggagtgtatactggcttactatgttggcactgatgagggtgtcagtgaagtgcttcatgtggcaggagaaaaaaggctgcaccggtgcgtcagcagaatatgtgatacaggatatattccgcttcctcgctcactgactcgctacgctcggtcgttcgactgcggcgagcggaaatggcttacgaacggggcggagatttcctggaagatgccaggaagatacttaacagggaagtgagagggccgcggcaaagccgtttttccataggctccgcccccctgacaagcatcacgaaatctgacgctcaaatcagtggtggcgaaacccgacaggactataaagataccaggcgtttcccctggcggctccctcgtgcgctctcctgttcctgcctttcggtttaccggtgtcattccgctgttatggccgcgtttgtctcattccacgcctgacactcagttccgggtaggcagttcgctccaagctggactgtatgcacgaaccccccgttcagtccgaccgctgcgccttatccggtaactatcgtcttgagtccaacccggaaagacatgcaaaagcaccactggcagcagccactggtaattgatttagaggagttagtcttgaagtcatgcgccggttaaggctaaactgaaaggacaagttttggtgactgcgctcctccaagccagttacctcggttcaaagagttggtagctcagagaaccttcgaaaaaccgccctgcaaggcggttttttcgttttcagagcaagagattacgcgcagaccaaaacgatctcaagaagatcatcttattaatcagataaaatatttctagatttcagtgcaatttatctcttcaaatgtagcacctgaagtcagccccatacgatataagttgtaattctcatgttagtcatgccccgcgcccaccggaaggagctgactgggttgaaggctctcaagggcatcggtcgagatcccggtgcctaatgagtgagctaacttacattaattgcgttgcgctcactgcccgctttccagtcgggaaacctgtcgtgccagctgcattaatgaatcggccaacgcgcggggagaggcggtttgcgtattgggcgccagggtggtttttcttttcaccagtgagacgggcaacagctgattgcccttcaccgcctggccctgagagagttgcagcaagcggtccacgctggtttgccccagcaggcgaaaatcctgtttgatggtggttaacggcgggatataacatgagctgtcttcggtatcgtcgtatcccactaccgagatgtccgcaccaacgcgcagcccggactcggtaatggcgcgcattgcgcccagcgccatctgatcgttggcaaccagcatcgcagtgggaacgatgccctcattcagcatttgcatggtttgttgaaaaccggacatggcactccagtcgccttcccgttccgctatcggctgaatttgattgcgagtgagatatttatgccagccagccagacgcagacgcgccgagacagaacttaatgggcccgctaacagcgcgatttgctggtgacccaatgcgaccagatgctccacgcccagtcgcgtaccgtcttcatgggagaaaataatactgttgatgggtgtctggtcagagacatcaagaaataacgccggaacattagtgcaggcagcttccacagcaatggcatcctggtcatccagcggatagttaatgatcagcccactgacgcgttgcgcgagaagattgtgcaccgccgctttacaggcttcgacgccgcttcgttctaccatcgacaccaccacgctggcacccagttgatcggcgcgagatttaatcgccgcgacaatttgcgacggcgcgtgcagggccagactggaggtggcaacgccaatcagcaacgactgtttgcccgccagttgttgtgccacgcggttgggaatgtaattcagctccgccatcgccgcttccactttttcccgcgttttcgcagaaacgtggctggcctggttcaccacgcgggaaacggtctgataagagacaccggcatactctgcgacatcgtataacgttactggtttcacattcaccaccctgaattgactctcttccgggcgctatcatgccataccgcgaaaggttttgcgccattcgatggtgtccgggatctcgacgctctcccttatgcgactcctgcattaggaaattaatacgactcactataggggaattgtgagcggataacaattcccctgtagaaataattttgtttaactttaataaggagatataccatgacggatgtccgctttcgtatcattggcacgggcgcttacgtcccggaacgcattgtcagcaacgacgaagtcggcgcaccggctggtgtggatgacgattggattacgcgtaaaaccggtatccgccagcgtcgctgggcggccgacgatcaagcaacgagcgatctggctaccgcagctggtcgtgcagcactgaaagcagctggcattacgccggaacagctgaccgtcatcgcagtggctacctctacgccggaccgtccgcagccgccgaccgcggcctatgttcaacatcacctgggtgcaaccggcacggcagcttttgatgttaacgctgtgtgcagcggtacggttttcgcgctgagctctgttgccggcaccctggtctatcgtggcggttacgcactggtcattggtgctgatctgtactcacgtatcctgaatccggcggaccgcaaaaccgtggttctgttcggcgatggtgcgggcgcgatggtgctgggcccgaccagcaccggcaccggtccgattgtgcgtcgcgttgcactgcatacgtttggcggtctgaccgatctgatccgtgttccggccggcggttcccgccagccgctggacaccgatggtctggacgcaggcctgcaatattttgcgatggatggccgcgaagtccgtcgcttcgtgaccgaacatctgccgcagctgattaaaggttttctgcacgaagcgggcgtggatgcggcggatattagccatttcgtgccgcaccaagccaacggtgtgatgctggacgaagtttttggcgaactgcatctgccgcgtgcaaccatgcaccgtacggtggaaacctacggtaatacgggcgcagctagtattccgatcacgatggatgcggccgttcgtgcaggttccttccgtccgggcgaactggttctgctggcgggctttggcggcggtatggcggcttcgtttgctctgattgaatggtgacctaatgcaggctgcaggcggatacgaggaggaataaaccatgaaaaaggtatgtgttataggtgcaggtactatgggttcaggaattgctcaggcatttgcagctaaaggatttgaagtagtattaagagatattaaagatgaatttgttgatagaggattagattttatcaataaaaatctttctaaattagttaaaaaaggaaagatagaagaagctactaaagttgaaatcttaactagaatttccggaacagttgaccttaatatggcagctgattgcgatttagttatagaagcagctgttgaaagaatggatattaaaaagcagatttttgctgacttagacaatatatgcaagccagaaacaattcttgcatcaaatacatcatcactttcaataacagaagtggcatcagcaactaaaagacctgataaggttataggtatgcatttctttaatccagctcctgttatgaagcttgtagaggtaataagaggaatagctacatcacaagaaacttttgatgcagttaaagagacatctatagcaataggaaaagatcctgtagaagtagcagaagcaccaggatttgttgtaaatagaatattaataccaatgattaatgaagcagttggtatattagcagaaggaatagcttcagtagaagacatagataaagctatgaaacttggagctaatcacccaatgggaccattagaattaggtgattttataggtcttgatatatgtcttgctataatggatgttttatactcagaaactggagattctaagtatagaccacatacattacttaagaagtatgtaagagcaggatggcttggaagaaaatcaggaaaaggtttctacgattattcaaaataagtttacaggatctgcagggaggaggaaatcatggagttgaacaacgttattctggagaaagaaggcaaggtggcggttgtcaccattaaccgtccaaaggccctgaacgctctgaactcggataccctgaaagagatggattacgttattggcgagattgagaatgacagcgaagtgctggctgtgattctgaccggtgcgggtgagaagagctttgtcgcgggtgcggacatcagcgagatgaaagaaatgaacaccatcgaaggccgtaagttcggtattctgggcaacaaggtgtttcgtcgtctggaactgctggagaaacctgtcattgctgccgtgaacggtttcgcgctgggcggtggttgcgagatcgctatgagctgcgatattcgtatcgcatcgtccaacgcacgctttggtcaaccggaggtcggtctgggtatcactccgggtttcggcggtacgcaacgtctgagccgcctggttggcatgggcatggcgaaacagttgattttcacggcacagaacattaaggcggatgaggcgctgcgtattggtctggtgaataaggtcgttgagccaagcgaactgatgaataccgcgaaagaaattgcgaacaagatcgttagcaatgccccggtggccgttaagctgtcgaaacaggcaatcaaccgtggcatgcagtgtgacatcgacaccgccctggcgtttgagagcgaggcgtttggtgagtgcttctccaccgaggaccaaaaggatgcgatgaccgcgttcattgagaaacgcaagatcgagggtttcaagaatcgttaatagaggaggataggaggttttcatatgattgtgaaaccgatggtccgtaataatatctgtctgaatgctcacccgcagggctgtaaaaaaggcgtggaagatcaaattgaatataccaaaaaacgtattacggcagaagtgaaagccggcgcaaaagctccgaaaaacgtgctggttctgggttgcagcaatggctatggtctggcttctcgcattaccgcggcctttggctacggtgcagctacgatcggcgttagtttcgaaaaagcaggttccgaaaccaaatatggcacgccgggttggtacaacaatctggcttttgatgaagcggccaaacgtgaaggcctgtatagtgtcaccattgatggtgacgcgttctccgatgaaattaaagcacaggtgatcgaagaagcgaagaaaaaaggcattaaatttgacctgatcgtttacagcctggcatctccggtccgtaccgatccggacacgggtatcatgcataaatctgtgctgaaaccgtttggcaaaaccttcacgggtaaaaccgttgatccgttcacgggcgaactgaaagaaattagcgcggaaccggccaacgatgaagaagcagctgcgaccgtcaaagtgatgggcggtgaagactgggaacgttggatcaaacagctgagtaaagaaggcctgctggaagaaggttgcattaccctggcgtattcctacatcggcccggaagcaacccaagctctgtatcgcaaaggcacgattggtaaagcgaaagaacatctggaagcgaccgcccaccgtctgaacaaagaaaatccgtcaatccgcgccttcgtttcggtcaataaaggtctggttacccgtgcatcagctgtgattccggttatcccgctgtacctggcatcgctgtttaaagtcatgaaagaaaaaggcaaccatgaaggttgtattgaacagatcacccgcctgtatgccgaacgtctgtaccgcaaagatggtacgattccggtggacgaagaaaatcgtattcgcatcgatgactgggaactggaagaagatgtccaaaaagccgtgagcgccctgatggaaaaagttaccggcgaaaacgcggaatctctgacggatctggccggttatcgtcacgactttctggcgagtaatggttttgatgttgaaggcattaactacgaagctgaagtggaacgctttgatcgcatttgatctagaatatcggccggccacgcgatcgctgac

SEQ ID NO: 197 - DNA, 7376 bp, Artificial Sequence
  Description of Artificial Sequence: Synthetic pET28B-ptb-buk  polynucleotide
tggcgaatgggacgcgccctgtagcggcgcattaagcgcggcgggtgtggtggttacgcgcagcgtgaccgctacacttgccagcgccctagcgcccgctcctttcgctttcttcccttcctttctcgccacgttcgccggctttccccgtcaagctctaaatcgggggctccctttagggttccgatttagtgctttacggcacctcgaccccaaaaaacttgattagggtgatggttcacgtagtgggccatcgccctgatagacggtttttcgccctttgacgttggagtccacgttctttaatagtggactcttgttccaaactggaacaacactcaaccctatctcggtctattcttttgatttataagggattttgccgatttcggcctattggttaaaaaatgagctgatttaacaaaaatttaacgcgaattttaacaaaatattaacgtttacaatttcaggtggcacttttcggggaaatgtgcgcggaacccctatttgtttatttttctaaatacattcaaatatgtatccgctcatgaattaattcttagaaaaactcatcgagcatcaaatgaaactgcaatttattcatatcaggattatcaataccatatttttgaaaaagccgtttctgtaatgaaggagaaaactcaccgaggcagttccataggatggcaagatcctggtatcggtctgcgattccgactcgtccaacatcaatacaacctattaatttcccctcgtcaaaaataaggttatcaagtgagaaatcaccatgagtgacgactgaatccggtgagaatggcaaaagtttatgcatttctttccagacttgttcaacaggccagccattacgctcgtcatcaaaatcactcgcatcaaccaaaccgttattcattcgtgattgcgcctgagcgagacgaaatacgcgatcgctgttaaaaggacaattacaaacaggaatcgaatgcaaccggcgcaggaacactgccagcgcatcaacaatattttcacctgaatcaggatattcttctaatacctggaatgctgttttcccggggatcgcagtggtgagtaaccatgcatcatcaggagtacggataaaatgcttgatggtcggaagaggcataaattccgtcagccagtttagtctgaccatctcatctgtaacatcattggcaacgctacctttgccatgtttcagaaacaactctggcgcatcgggcttcccatacaatcgatagattgtcgcacctgattgcccgacattatcgcgagcccatttatacccatataaatcagcatccatgttggaatttaatcgcggcctagagcaagacgtttcccgttgaatatggctcataacaccccttgtattactgtttatgtaagcagacagttttattgttcatgaccaaaatcccttaacgtgagttttcgttccactgagcgtcagaccccgtagaaaagatcaaaggatcttcttgagatcctttttttctgcgcgtaatctgctgcttgcaaacaaaaaaaccaccgctaccagcggtggtttgtttgccggatcaagagctaccaactctttttccgaaggtaactggcttcagcagagcgcagataccaaatactgtccttctagtgtagccgtagttaggccaccacttcaagaactctgtagcaccgcctacatacctcgctctgctaatcctgttaccagtggctgctgccagtggcgataagtcgtgtcttaccgggttggactcaagacgatagttaccggataaggcgcagcggtcgggctgaacggggggttcgtgcacacagcccagcttggagcgaacgacctacaccgaactgagatacctacagcgtgagctatgagaaagcgccacgcttcccgaagggagaaaggcggacaggtatccggtaagcggcagggtcggaacaggagagcgcacgagggagcttccagggggaaacgcctggtatctttatagtcctgtcgggtttcgccacctctgacttgagcgtcgatttttgtgatgctcgtcaggggggcggagcctatggaaaaacgccagcaacgcggcctttttacggttcctggccttttgctggccttttgctcacatgttctttcctgcgttatcccctgattctgtggataaccgtattaccgcctttgagtgagctgataccgctcgccgcagccgaacgaccgagcgcagcgagtcagtgagcgaggaagcggaagagcgcctgatgcggtattttctccttacgcatctgtgcggtatttcacaccgcatatatggtgcactctcagtacaatctgctctgatgccgcatagttaagccagtatacactccgctatcgctacgtgactgggtcatggctgcgccccgacacccgccaacacccgctgacgcgccctgacgggcttgtctgctcccggcatccgcttacagacaagctgtgaccgtctccgggagctgcatgtgtcagaggttttcaccgtcatcaccgaaacgcgcgaggcagctgcggtaaagctcatcagcgtggtcgtgaagcgattcacagatgtctgcctgttcatccgcgtccagctcgttgagtttctccagaagcgttaatgtctggcttctgataaagcgggccatgttaagggcggttttttcctgtttggtcactgatgcctccgtgtaagggggatttctgttcatgggggtaatgataccgatgaaacgagagaggatgctcacgatacgggttactgatgatgaacatgcccggttactggaacgttgtgagggtaaacaactggcggtatggatgcggcgggaccagagaaaaatcactcagggtcaatgccagcgcttcgttaatacagatgtaggtgttccacagggtagccagcagcatcctgcgatgcagatccggaacataatggtgcagggcgctgacttccgcgtttccagactttacgaaacacggaaaccgaagaccattcatgttgttgctcaggtcgcagacgttttgcagcagcagtcgcttcacgttcgctcgcgtatcggtgattcattctgctaaccagtaaggcaaccccgccagcctagccgggtcctcaacgacaggagcacgatcatgcgcacccgtggggccgccatgccggcgataatggcctgcttctcgccgaaacgtttggtggcgggaccagtgacgaaggcttgagcgagggcgtgcaagattccgaataccgcaagcgacaggccgatcatcgtcgcgctccagcgaaagcggtcctcgccgaaaatgacccagagcgctgccggcacctgtcctacgagttgcatgataaagaagacagtcataagtgcggcgacgatagtcatgccccgcgcccaccggaaggagctgactgggttgaaggctctcaagggcatcggtcgagatcccggtgcctaatgagtgagctaacttacattaattgcgttgcgctcactgcccgctttccagtcgggaaacctgtcgtgccagctgcattaatgaatcggccaacgcgcggggagaggcggtttgcgtattgggcgccagggtggtttttcttttcaccagtgagacgggcaacagctgattgcccttcaccgcctggccctgagagagttgcagcaagcggtccacgctggtttgccccagcaggcgaaaatcctgtttgatggtggttaacggcgggatataacatgagctgtcttcggtatcgtcgtatcccactaccgagatatccgcaccaacgcgcagcccggactcggtaatggcgcgcattgcgcccagcgccatctgatcgttggcaaccagcatcgcagtgggaacgatgccctcattcagcatttgcatggtttgttgaaaaccggacatggcactccagtcgccttcccgttccgctatcggctgaatttgattgcgagtgagatatttatgccagccagccagacgcagacgcgccgagacagaacttaatgggcccgctaacagcgcgatttgctggtgacccaatgcgaccagatgctccacgcccagtcgcgtaccgtcttcatgggagaaaataatactgttgatgggtgtctggtcagagacatcaagaaataacgccggaacattagtgcaggcagcttccacagcaatggcatcctggtcatccagcggatagttaatgatcagcccactgacgcgttgcgcgagaagattgtgcaccgccgctttacaggcttcgacgccgcttcgttctaccatcgacaccaccacgctggcacccagttgatcggcgcgagatttaatcgccgcgacaatttgcgacggcgcgtgcagggccagactggaggtggcaacgccaatcagcaacgactgtttgcccgccagttgttgtgccacgcggttgggaatgtaattcagctccgccatcgccgcttccactttttcccgcgttttcgcagaaacgtggctggcctggttcaccacgcgggaaacggtctgataagagacaccggcatactctgcgacatcgtataacgttactggtttcacattcaccaccctgaattgactctcttccgggcgctatcatgccataccgcgaaaggttttgcgccattcgatggtgtccgggatctcgacgctctcccttatgcgactcctgcattaggaagcagcccagtagtaggttgaggccgttgagcaccgccgccgcaaggaatggtgcatgcaaggagatggcgcccaacagtcccccggccacggggcctgccaccatacccacgccgaaacaagcgctcatgagcccgaagtggcgagcccgatcttccccatcggtgatgtcggcgatataggcgccagcaaccgcacctgtggcgccggtgatgccggccacgatgcgtccggcgtagaggatcgagatctcgatcccgcgaaattaatacgactcactataggggaattgtgagcggataacaattcccctctagaaataattttgtttaactttaagaaggagatataccatggcgattaagagttttaatgaaattatcatgaaggtaaagagcaaagaaatgaaaaaagttgctgttgctgtagcacaagacgagccagtacttgaagcagtaagagatgctaagaaaaatggtattgcagatgctattcttgttggagaccatgacgaaatcgtgtcaatcgcgcttaaaataggaatggatgtaaatgattttgaaatagtaaacgagcctaacgttaagaaagctgctttaaaggcagtagagcttgtatcaactggaaaagctgatatggtaatgaagggacttgtaaatacagcaactttcttaagatctgtattaaacaaagaagttggacttagaacaggaaaaactatgtctcacgttgcagtatttgaaactgagaaatttgatagactattatttttaacagatgttgctttcaatacttatcctgaattaaaggaaaaaattgatatagtaaacaattcagttaaggttgcacatgcaataggaattgaaaatccaaaggttgctccaatttgtgcagttgaggttataaaccctaaaatgccatcaacacttgatgcagcaatgctttcaaaaatgagtgacagaggacaaattaaaggttgtgtagttgacggacctttagcacttgatatagctttatcagaagaagcagcacatcataagggagtaacaggagaagttgctggaaaagctgatatcttcttaatgccaaacatagaaacaggaaatgtaatgtataagactttaacatatacaactgattcaaaaaatggaggaatcttagttggaacttctgcaccagttgttttaacttcaagagctgacagccatgaaacaaaaatgaactctatagcacttgcagctttagttgcaggcaataaataaattaaagttaagtggaggaatgttaacatgtatagattactaataatcaatcctggctcgacctcaactaaaattggtatttatgacgatgaaaaagagatatttgagaagactttaagacattcagctgaagagatagaaaaatataacactatatttgatcaatttcaattcagaaagaatgtaattttagatgcgttaaaagaagcaaacatagaagtaagttctttaaatgctgtagttggaagaggcggactcttaaagccaatagtaagtggaacttatgcagtaaatcaaaaaatgcttgaagaccttaaagtaggagttcaaggtcagcatgcgtcaaatcttggtggaattattgcaaatgaaatagcaaaagaaataaatgttccagcatacatagttgatccagttgttgtggatgagcttgatgaagtttcaagaatatcaggaatggctgacattccaagaaaaagtatattccatgcattaaatcaaaaagcagttgctagaagatatgcaaaagaagttggaaaaaaatacgaagatcttaatttaatcgtagtccacatgggtggaggtacttcagtaggtactcataaagatggtagagtaatagaagttaataatacacttgatggagaaggtccattctcaccagaaagaagtggtggagttccaataggagatcttgtaagattgtgcttcagcaacaaatatacttatgaagaagtaatgaaaaagataaacggcaaaggcggagttgttagttacttaaatactatcgattttaaggctgtagttgataaagctcttgaaggagataagaaatgtgcacttatatatgaagctttcacattccaggtagcaaaagagataggaaaatgttcaaccgttttaaaaggaaatgtagatgcaataatcttaacaggcggaattgcgtacaacgagcatgtatgtaatgccatagaggatagagtaaaattcatagcacctgtagttagatatggtggagaagatgaacttcttgcacttgcagaaggtggacttagagttttaagaggagaagaaaaagctaaggaatacaaataataaagtcataaataatataatataaccagtacccatgtttataaaacttttgccctggtaccatatggctagcatgactggtggacagcaaatgggtcgggatccgaattcgagctccgtcgacaagcttgcggccgcactcgagcaccaccaccaccaccactgagatccggctgctaacaaagcccgaaaggaagctgagttggctgctgccaccgctgagcaataactagcataaccccttggggcctctaaacgggtcttgaggggttttttgctgaaaggaggaactatatccggat

SEQ ID NO: 198 - DNA, 8467 bp, Artificial Sequence
  Description of Artificial Sequence: Synthetic pACYC-T7-nphT07-phaB-T7-ech2-crr polynucleotide
cgctgacgtcggtaccctcgagtctggtaaagaaaccgctgctgcgaaatttgaacgccagcacatggactcgtctactagcgcagcttaattaacctaggctgctgccaccgctgagcaataactagcataaccccttggggcctctaaacgggtcttgaggggttttttgctgaaacctcaggcatttgagaagcacacggtcacactgcttccggtagtcaataaaccggtaaaccagcaatagacataagcggctatttaacgaccctgccctgaaccgacgaccgggtcgaatttgctttcgaatttctgccattcatccgcttattatcacttattcaggcgtagcaccaggcgtttaagggcaccaataactgccttaaaaaaattacgccccgccctgccactcatcgcagtactgttgtaattcattaagcattctgccgacatggaagccatcacagacggcatgatgaacctgaatcgccagcggcatcagcaccttgtcgccttgcgtataatatttgcccatagtgaaaacgggggcgaagaagttgtccatattggccacgtttaaatcaaaactggtgaaactcacccagggattggctgagacgaaaaacatattctcaataaaccctttagggaaataggccaggttttcaccgtaacacgccacatcttgcgaatatatgtgtagaaactgccggaaatcgtcgtggtattcactccagagcgatgaaaacgtttcagtttgctcatggaaaacggtgtaacaagggtgaacactatcccatatcaccagctcaccgtctttcattgccatacggaactccggatgagcattcatcaggcgggcaagaatgtgaataaaggccggataaaacttgtgcttatttttctttacggtctttaaaaaggccgtaatatccagctgaacggtctggttataggtacattgagcaactgactgaaatgcctcaaaatgttctttacgatgccattgggatatatcaacggtggtatatccagtgatttttttctccattttagcttccttagctcctgaaaatctcgataactcaaaaaatacgcccggtagtgatcttatttcattatggtgaaagttggaacctcttacgtgccgatcaacgtctcattttcgccaaaagttggcccagggcttcccggtatcaacagggacaccaggatttatttattctgcgaagtgatcttccgtcacaggtatttattcggcgcaaagtgcgtcgggtgatgctgccaacttactgatttagtgtatgatggtgtttttgaggtgctccagtggcttctgtttctatcagctgtccctcctgttcagctactgacggggtggtgcgtaacggcaaaagcaccgccggacatcagcgctagcggagtgtatactggcttactatgttggcactgatgagggtgtcagtgaagtgcttcatgtggcaggagaaaaaaggctgcaccggtgcgtcagcagaatatgtgatacaggatatattccgcttcctcgctcactgactcgctacgctcggtcgttcgactgcggcgagcggaaatggcttacgaacggggcggagatttcctggaagatgccaggaagatacttaacagggaagtgagagggccgcggcaaagccgtttttccataggctccgcccccctgacaagcatcacgaaatctgacgctcaaatcagtggtggcgaaacccgacaggactataaagataccaggcgtttcccctggcggctccctcgtgcgctctcctgttcctgcctttcggtttaccggtgtcattccgctgttatggccgcgtttgtctcattccacgcctgacactcagttccgggtaggcagttcgctccaagctggactgtatgcacgaaccccccgttcagtccgaccgctgcgccttatccggtaactatcgtcttgagtccaacccggaaagacatgcaaaagcaccactggcagcagccactggtaattgatttagaggagttagtcttgaagtcatgcgccggttaaggctaaactgaaaggacaagttttggtgactgcgctcctccaagccagttacctcggttcaaagagttggtagctcagagaaccttcgaaaaaccgccctgcaaggcggttttttcgttttcagagcaagagattacgcgcagaccaaaacgatctcaagaagatcatcttattaatcagataaaatatttctagatttcagtgcaatttatctcttcaaatgtagcacctgaagtcagccccatacgatataagttgtaattctcatgttagtcatgccccgcgcccaccggaaggagctgactgggttgaaggctctcaagggcatcggtcgagatcccggtgcctaatgagtgagctaacttacattaattgcgttgcgctcactgcccgctttccagtcgggaaacctgtcgtgccagctgcattaatgaatcggccaacgcgcggggagaggcggtttgcgtattgggcgccagggtggtttttcttttcaccagtgagacgggcaacagctgattgcccttcaccgcctggccctgagagagttgcagcaagcggtccacgctggtttgccccagcaggcgaaaatcctgtttgatggtggttaacggcgggatataacatgagctgtcttcggtatcgtcgtatcccactaccgagatgtccgcaccaacgcgcagcccggactcggtaatggcgcgcattgcgcccagcgccatctgatcgttggcaaccagcatcgcagtgggaacgatgccctcattcagcatttgcatggtttgttgaaaaccggacatggcactccagtcgccttcccgttccgctatcggctgaatttgattgcgagtgagatatttatgccagccagccagacgcagacgcgccgagacagaacttaatgggcccgctaacagcgcgatttgctggtgacccaatgcgaccagatgctccacgcccagtcgcgtaccgtcttcatgggagaaaataatactgttgatgggtgtctggtcagagacatcaagaaataacgccggaacattagtgcaggcagcttccacagcaatggcatcctggtcatccagcggatagttaatgatcagcccactgacgcgttgcgcgagaagattgtgcaccgccgctttacaggcttcgacgccgcttcgttctaccatcgacaccaccacgctggcacccagttgatcggcgcgagatttaatcgccgcgacaatttgcgacggcgcgtgcagggccagactggaggtggcaacgccaatcagcaacgactgtttgcccgccagttgttgtgccacgcggttgggaatgtaattcagctccgccatcgccgcttccactttttcccgcgttttcgcagaaacgtggctggcctggttcaccacgcgggaaacggtctgataagagacaccggcatactctgcgacatcgtataacgttactggtttcacattcaccaccctgaattgactctcttccgggcgctatcatgccataccgcgaaaggttttgcgccattcgatggtgtccgggatctcgacgctctcccttatgcgactcctgcattaggaaattaatacgactcactataggggaattgtgagcggataacaattcccctgtagaaataattttgtttaactttaataaggagatatacatgacggatgtccgctttcgtatcattggcacgggcgcttacgtcccggaacgcattgtcagcaacgacgaagtcggcgcaccggctggtgtggatgacgattggattacgcgtaaaaccggtatccgccagcgtcgctgggcggccgacgatcaagcaacgagcgatctggctaccgcagctggtcgtgcagcactgaaagcagctggcattacgccggaacagctgaccgtcatcgcagtggctacctctacgccggaccgtccgcagccgccgaccgcggcctatgttcaacatcacctgggtgcaaccggcacggcagcttttgatgttaacgctgtgtgcagcggtacggttttcgcgctgagctctgttgccggcaccctggtctatcgtggcggttacgcactggtcattggtgctgatctgtactcacgtatcctgaatccggcggaccgcaaaaccgtggttctgttcggcgatggtgcgggcgcgatggtgctgggcccgaccagcaccggcaccggtccgattgtgcgtcgcgttgcactgcatacgtttggcggtctgaccgatctgatccgtgttccggccggcggttcccgccagccgctggacaccgatggtctggacgcaggcctgcaatattttgcgatggatggccgcgaagtccgtcgcttcgtgaccgaacatctgccgcagctgattaaaggttttctgcacgaagcgggcgtggatgcggcggatattagccatttcgtgccgcaccaagccaacggtgtgatgctggacgaagtttttggcgaactgcatctgccgcgtgcaaccatgcaccgtacggtggaaacctacggtaatacgggcgcagctagtattccgatcacgatggatgcggccgttcgtgcaggttccttccgtccgggcgaactggttctgctggcgggctttggcggcggtatggcggcttcgtttgctctgattgaatggtgacctaatcgaggcaaacgaggcgttcgccgctcaagcctgtgccgtgaataaggatatgggttgggacccgagcatcgttaatgtgaatggtggtgcaatcgcgatcggccatccgatcggcgcaagcggtgcacgcgttctgaacacgctgctgtttgaaatgcagcgccgcaatgcgaagaaaggtttggctaccctgtgcattggcggtggtatgggtgtcgccatgtgcctggagcgtccgtagtaacacgtggagttaggaggaaaaatcatgagcaaagtggccctggtgaccggtggttcccgtggcatcggtgccgcgatctccgtggccctgaagaatgcaggctataccgtcgcggccaactacgcgggtaatgacgaggcggcacgtaagtttaccgaagagacgggcatcaagacgtacaaatggagcgtcgccgattacgacgcgtgcgctgcgggcatcgcacaagtggaagcagaactgggtccggttgcagtcctggtcaacaacgcgggtattacccgtgatagcatgtttcataagatgactcgtgaccaatggaaagaggtcatcgacacgaacctgagcggcttgttcaacatgactcatccggtttggagcggtatgcgcgaccgcaagtttggtcgtatcatcaatatcagcagcattaacggtcagaagggccaggcaggtcaagccaactacagcgcggcaaaagccggcgacctgggcttcacgaaagctctggcccaagagggtgcgcgtgcaggcatcaccgtgaatgcgatctgtccgggctatatcgccaccgaaatggttatggctgtcccggagaaagttcgcgagagcattatcgcacagattcctaccggccgtctgggtgagccggaagagattgcgcgttgtgtcgtttttctggcgagcgacgatgcgggctttgtcaccggttctaccatcacggcaaacggtggtcagtactttgtctaaatcgaaattaatacgactcactataggggaattgtgagcggataacaattccccatcttagtatattagttaagtataagaaggagatataccatggccgatgcaagtggctttgcgggtgtcgtgggccataaactgccgtctttcagttcctcatataccgaactgcagtgcattatgtacgctctgggtgttggcgcgagtgtcaaaaacccgaaggacctgaaatttgtgtatgaaggttccgccgatttttcatgtctgccgaccttcggcgttattgtcgcccagaaatctctgatgagtggcggtctggcagaagtcccgggtctgagcatcaatttcgctaaagtgctgcacggcgaacaatatctggaactgtacaagccgctgccgcgttcgggcgaactgaaatgcgaagccgttattgcagacatcctggataagggtagcggcattgtgatcgttatggatgtgtattcctactcaggcaaggaactgatttgttataaccagttctcggttttcgttgtcggcagcggcggttttggcggtaaacgcacctcggaaaaactgaaggcagctgtcgctgtgccgagccgcccgccggacgcagtgctgcgtgataccacgagcctgaaccaggcggccctgtaccgtctgtccggtgactcaaatccgctgcatattgatccgtcgtttgctagcatcgcgggcttcgaaaaaccgattctgcatggtctgtgcacctttggcttctctgcccgccacgtgctgcagcaatttgcagacaatgatgttagtcgctttaaggccattaaagtgcgtttcgcaaaaccggtttatccgggtcagaccctgcaaacggaaatgtggaaggaaggcaaccgtatccatttccagaccaaagtccaagaaacgggtgacattgtgatcagcaatgcgtacgttgatctggtcccgacctctggtgtgagtgcacagacgccgtctgaaggcggtgctctgcaaagtgcgctggtttttggtgaaattggccgccgtctgaaagatgtcggtcgtgaagtggttaaaaaggtgaacgcggttttcgaatggcacattaccaaaaacggcaatgtggccgctaagtggacgatcgatctgaaaaatggtagtggcgaagtttatcagggtccggccaaaggctccgcagataccacgattaccatctcagacgaagattttatggaagtcgtgctgggcaagctgaacccgcagaatgcgtttttcagcggccgtctgaaagcgcgtggcaacattatgctgtcgcaaaaactgcaaatgattctgaaagattacgccaaactgtgaacgcgagaggaggaaaccatgactgtcaaagacatcctggatgcaatccagtccaaagacgcaacgagcgcggacttcgccgccttgcaactgccggaaagctaccgtgcaattaccgtgcacaaagacgagactgagatgtttgccggcctggaaacgcgcgataaagacccgcgtaaaagcattcatctggatgaggttccggtgccggagctgggtccgggcgaagctctggttgccgttatggcaagctctgtgaactacaacagcgtgtggaccagcatctttgaaccggtgtctacgttcgcttttctggagcgctatggtaagctgagcccgctgaccaagcgtcacgatctgccgtaccacattatcggtagcgatctggcaggtgtggtgctgcgtacgggtccgggtgttaatgcctggcagccaggtgacgaggtcgtggcgcattgtctgtctgttgagctggagagcccggatggccacgacgacaccatgctggatccggaacagcgtatctggggcttcgaaaccaatttcggtggtctggcagagattgcgctggtcaaaacgaaccaattgatgccgaagccgaaacatctgacgtgggaagaagcggcagcgccaggtctggtcaattctaccgcgtatcgccagctggtgagccgtaatggcgcagctatgaaacaaggtgacaatgttctgatttggggcgctagcggtggcctgggttcctatgcgacccaatttgcattggcaggcggtgcgaatccgatttgcgttgtgagcagcccgcaaaaagcggaaatctgtcgtagcatgggtgctgaagcgattatcgatcgtaatgcagagggctacaagttctggaaggacgaacacactcaagatccgaaagagtggaaacgcttcggcaagcgtatccgcgaattgaccggtggtgaggacattgacatcgtctttgaacaccctggtcgcgaaacgttcggtgcaagcgtttacgtcacgcgcaaaggcggcaccatcaccacctgtgcgagcacgagcggctatatgcacgagtacgacaaccgttacttgtggatgagcctgcgcatcatcggtagccattttgcgaactaccgcgaagcatatgaagccaatcgtttgattgcgaagggtaagattcaccctaccctgtccaagacctattctctggaagaaaccggccaggccgcgtacgatgtccatcgtaacttgcaccagggcaaagtcggcgtgttgtgcctggctccggaagagggcctgggtgtgcgtgacgcggagatgcgtgcacagcatattgatgcgatcaatcgtttccgcaatgtcaagcttctcgagcgatcgatcgactgactga

SEQ ID NO: 199 - DNA, 915 bp, Artificial Sequence
  Description of Artificial Sequence: Synthetic ELO1 polynucleotide
atgttcttcaccccgccgcaactgcaaaaactggaacaggattggaatggtctggctgtccgtgactggatgatcgcaaatgtggatgtggttctgtatatttcatttctgtacctgggctttgtcttcatcggtccgaaactgttcgccaaactggttggcacgaacccggcggcggcggcggcgggtgcacgtagcgcagatggcaccggttctccgattgtgcgtcgcagtatggtcgtgtggaatctggcgctgagcatttttagcatcttcggcacctccacggttaccccggtcctgctgcgcaacctggctaataaaggcttttatggtgcgacgtgcgattttaaagaaaccgaattttacaccacgaacgttggcttttggatgggtattttcgccctgagcaaaatcccggaactggtggataccatttttctggtgctgcaaggcaaacaagaactgccgttcctgcattggtatcatcacgtcacggtgctgctgttttcttggcacacctattgtgttggtagctctgcgtacatctgggtcgccgcaatgaattattcagtgcattcggttatgtatctgtacttcgctctggctgcgctgggttataagcgtgtggtccgcccgctggcgccgtacattacgattatccagatcctgcaaatggtggttggctgctatgtgaccatctttgctctgcaagaactgcacggtgaaggcggtcgtggttgtggtgtgagcccggcaaacatgcgcattcaactggttatgtatgcatcctatctgtacctgttttcaaaaatgttcgtggcatcgtacatccgtccgccgaaacgcccgaccgttggtggtccgagcagcacggcgggcgtctcaaacggttctgtggaaaagaaagtgaaa

SEQ ID NO: 200 - DNA, 816 bp, Artificial Sequence
  Description of Artificial Sequence: Synthetic ELO2 polynucleotide
atgtcttttccgtatgtcaccgactactctggttttgctattcgtaaatggatgattgataatgtggatgttgcgggtttcctgtgtctgctgtacctgggtctggtgtggaaaggtccgggcgtggttaaaagcctgcgtgagaaaaacctgattaatgcaaccctgctgcaaggcgtctttatcatgtggaacctgtttctgagtacgttctccgttattggtatgatcgtcgtggttccggcggccattgcgcatatctctaacaaaggtctggtcccggcactgtgcgaacgtgatgtgaatatgatttatgactcaccggttggcttttgggttggtgtcttcgccctgtcgaaaatcccggaactgtttgataccgtcctgctggtgctgcaaggcaaacaaccgccgtttctgcattggtatcatcacaccacggtgctgattttctcatggcagtcgtattgcgaaggcagctctaccatctttgtgttcgttgcaatgaacctgacggttcacgctgtcatgtatttttacttcgcgatgtgtgcctcaggtttcaaagcaattatgcgtaccatcgctccggttattacgatcatgcagattctgcaaatgatcgtgggcagcgcggttaccatgtattctgcctacgtgctgtataatccgcagccggatggcccgcaaacctgtgacgttacgaaagcaagtgctcgcatgggtgtcgtgatgtatctgtcctatctgtacctgtttgcggcactgttcgttgaatcttacctgaaaccgaaaaaacgcacggaaaaatctaaa

SEQ ID NO: 201 - DNA, 906 bp, Artificial Sequence
  Description of Artificial Sequence: Synthetic ELO3 polynucleotide
atggacctgatgaacttcggcggctcgtatgatgcttacattaacaactttcaaggcacgtttctggcggaatggatgctggaccacccgtcggtcccgtatattgcaggcgtgatgtacctgatcctggttctgtatgtcccgaaatcaattatggcttcgcagccgccgctgaacctgcgtgcagcaaacatcgtgtggaacctgtttctgacgctgttcagcatgtgcggtgcgtattacaccgttccgtatctggtcaaagcctttatgaacccggaaattgttatggcagcttctggcatcaaactggatgccaatacgagcccgattatcacccattctggtttctacaccacgacctgtgcgctggccgattctttttatttcaacggcgacgtgggtttttgggttgcactgttcgctctgagtaaaattccggaaatgatcgacacggcgtttctggttttccagaaaaagccggtcatttttctgcactggtatcatcacctgaccgtgatgctgttttgctggttcgcgtatgttcaaaaaattagctctggcctgtggtttgccagcatgaattacagtgtgcattccatcatgtatctgtattactttgtctgcgcatgtggtcaccgtcgcctggttcgtccgttcgctccgattatcacgtttgtgcagattttccaaatggtggttggcaccattgtggtgtgctatacgtacaccgtgaagcatgtgctgggccgttcgtgtacggttaccgattttagcctgcacaccggtctggtcatgtatgtgagttacctgctgctgttttcccaactgttctatcgctcatacctgtccccgcgtgacaaagcgagtatcccgcatgttgctgccgaaatcaaaaagaaagaa

SEQ ID NO: 202 - DNA, 1044 bp, Artificial Sequence
  Description of Artificial Sequence: Synthetic Sc_KCR polynucleotide
atgacttttatgcaacagcttcaagaggctggggaaagatttaggtgtatcaatggtcttttatgggttgtttttgggcttggtgtcttaaaatgtacaacgttatcacttagatttttagctcttatttttgatctttttttactaccagcagtcaatttcgacaagtatggtgctaaaactggtaaatactgtgctatcactggtgcaagtgacggtattggtaaagaatttgctagacaaatggcgaaacgtggcttcaacttggtattgatctcgagaacgcaatctaaattggaggctttacaaaaagaactagaagatcaacatcatgtcgttgtaaagattctagccattgacattgcggaggataaagaatccaactatgaatccattaaggaattgtgtgcgcagttaccaatcaccgttttggtcaataatgttggtcaatcacactccattcctgttccatttttggaaacagaagagaaggagcttagaaatattatcactatcaataacactgctacattattaattacacaaatcattgcaccaaagattgtggaaactgtgaaagctgaaaacaagaagtcgggtactcgtggtttgatcttaaccatgggctcatttggtggtctgattcccaccccacttttggctacatacagtggttcgaaatcattcttacaaggttggtctaactctttggctggggaattatctaaagatgctatcgatgttgaattaatcatttcatatttggtcactagctcgatgtctaaaatcagaagatcatctttaatgatcccaaatccacaacagtttgtaaaatccactttaagaagcgttggcagacgctgcggctctcaagaaagatacgctactatgaccccttactgggcgcacgcagtgtatcaatttgtaattacagagacctttggcgtttactctaagattgttaactccattaattattccttccataaatctatcagaattagagccttaaaaaaagccgcaagacaggttaaaaaggaatag

SEQ ID NO: 203 - DNA, 654 bp, Artificial Sequence
  Description of Artificial Sequence: Synthetic Sc_3HCDh polynucleotide
atgtcaaaaaaacttgcgtcaccattgtccttcttacccctttataatttgctttctgctgttggttggtcttatttgctttacttggtcatctccttgtacccaaaagttggacagccagcattcttctaccaaactaaaaatgtcgctacccttgttcaatgtggtgctataatcgagatcataaactcatttttaggagttgtacgttccccattgctgaccactgttgcacaagtgtcttcaagactactagttgtcctcggcatcttccaattgttgccaaacacaagtggtgttcaatcagttgtttacatatcattattactggcatggtctataactgagatcgtcagatacttgtattattttttcatgttggtattcaagaatggcgcaccaaagatcttaattctattaagatataatttgttctggattttgtaccccactggtgttgccagcgaactacgcattatttactgtgctttaaatgcagctgaatctcagtattctttactttacaaaagaattttaatagcggccatgctcgcttatatcccaggcttcccaatgctcttcctacacatggtagcacagagaaagaaagtcatgaaaagtttaagatcctctttcgggaagaaactaatttga

SEQ ID NO: 204 - DNA, 933 bp, Artificial Sequence
  Description of Artificial Sequence: Synthetic Sc_EnCR polynucleotide
atgcctatcaccataaaaagccgctctaaagggttaagggacactgaaattgacttatccaaaaagcctactttagatgatgttttgaaaaaaatctctgctaataaccacaatatcagcaagtacaggataagattaacctacaaaaaggaatctaaacaagttccggttatttcagaatcgttttttcaagaagaggctgatgactcaatggaattcttcatcaaagatttgggtccccaaatttcatggagattagtcttcttttgtgagtatttgggtccagtcttggttcactcccttttttattatctatctaccattcccacagttgttgatagatggcacagtgctagctccgactataatccatttttaaacagggttgcatattttttaattttaggacattatggaaagagattatttgaaaccttatttgttcaccaattctctttagctactatgccaattttcaacctgttcaaaaattgtttccattactgggttctaagcggtctcatttcattcggttactttggctacggcttcccctttgggaatgctaagttattcaaatactattcatatttgaaattggatgacttgagtacattaattggtcttttcgtgctttcagaactatggaacttttattgccacattaaattgcgcctatggggtgactatcaaaagaagcatggtaacgctaagatccgtgtcccattgaatcaaggtattttcaatctttttgttgctcccaactatacttttgaagtttggtcttggatttggtttacttttgtgttcaagttcaatttatttgccgttttatttttgactgtttcaacagctcaaatgtacgcatgggctcaaaagaaaaacaaaaagtatcataccagaagagcattcttgattccatttgtattttga

SEQ ID NO: 205 - DNA, 936 bp, Artificial Sequence
  Description of Artificial Sequence: Synthetic Tb_KCR (codon-optimized) polynucleotide
atgctgtttgattgtacgctgctgtcgctgctgggcgctatggttgcggctattggtctgtatcgtgtcgttcagtttgtccacctgacctttttcagcacgggccatgatctgaaacgtcgctattctaaagccggtgactgggcagtggttaccggcggtacggaaggcatcggtcgtgctgtggcgctggatctggcaaaccgtggttttaatgtgtgcgttattagtcgtacccagtccaaactggatgaagtcgtggcggaaatcgaaaaatgtggcacccgcggtcacagtattgcctttgatttcgccacggcaggtgaagcagaatataaaatgctgtttgctaaactggactcactggcggtgggcctgctggttaacaatgtcggtgtgaactatacctacgccaattacttcgatgaagcagacgttgtcgatgacctgcgtattatcaaagtgaactgcgaagctaccacgcgtatgaccaaatttttcgcaccgcgtatgaaagcacgtcgcgcaggcggtatcgtcctgctgggcagcttttctgctgttacgccggcaccgctgctggctacctatgcgggcacgaaagcgtttaacgtgagcttcggtgatgcgctgttttacgaactgaaaaaattcggtgttgacgtcctggtggttaccccgaatctggtcgtgtcacgtatgacccaaggtgcatcgacgcgcgcaccgaaagaaaccttcctgacggttggtgcggcggcgatggcgcgtcagaccctgaaccaactgggcgttgtcaatcgtacggcgggtcatcgcaatcacattatcattgaagctattgcacgtctgctgccggaatccctgcgtggtgaaaaaatgctggcgatgcacgaatcaatcaaaaaacgcgcagaacgcaaagcgaaacaatga

SEQ ID NO: 206 - DNA, 801 bp, Artificial Sequence
  Description of Artificial Sequence: Synthetic Tb_3HCDh (codon-optimized) polynucleotide
atggtcctgttcttcttcttttgtctgtcctcgggtcgcatggttgtgaaactgaaactgtccctgtattcctgtagcacgacgttcctgaccctggtgcatccgctgctgatgctgtcaaaagtctatctgctggcatacaacggtgtgctgctggcaggttggtcgacgattctgatgaaaatcgttcagcacctgtcaaccggcggtcgttttgcagatgtctattcgctgatcgctccgctgctggttgtgagccaatctgcggccgttctggaagtcctgcatgcgctgttcggtctggtgcgtagcccggttggcaccacgctgctgcaggttctgtctcgcctgctggtcctgtacggtgccctggaaattggtccgacggcagctcgtatgagtccgtttgcaacccaaatgatcgtggcgtggtccctggccgaagttattcgctatacgttctacgcaagcaatctggctggcgtcaaactgaaaccggtgacctggctgcgctattctgcgtttacggtgctgtacccgatgggcattaccggtgaaatcgcgtgcttcatttcagccctgccgtatatccgtgagaaaaaaccgtggacggttgaactgccgaaccgcctgaattttagtttctcctggtattacaccgtgctgctgctgctggcagtcgtgtatccggctggttcctacgttatgtatacctacatgctgcagcaacgtcgcaaagccctgaaagcgacggacgatgcgagccaaacggatgttagcaataagaaaaaagcctcataa

SEQ ID NO: 207 - DNA, 897 bp, Artificial Sequence
  Description of Artificial Sequence: Synthetic Tb_EnCR (codon-optimized) polynucleotide
atgaaagtgaccgtgattagtggctcgtccagcgaagtggttgaactgccgtccaatgcgggcctgaccgacctgaaaaaagtgtataaaccgcgtgttgatattcatcgcaaatcttttaaaatcctgcgtagtggcggtgataaaaacgacaaatcggcatatattaccctggatgccaaacgcgcactgacggaacagggcgtcaaagatggtagcgaagtggtttacaaagacctgggcccgcaagtcggttatcgtaccgtgtttgtcgtggaatacgccggcccgctggcaatcatgctggcttatgcggcccgcccgagcttcatttacggtagctctatcgtgaaagaatattgctacacgcagaaactgtatattgcgctgttttgtgcccacttcatcaaacgtgaactggaaacctttttcgtccataaattttctcacccgacgatgccgcgtcgcaacattatcaaaaattgcgtgtattactggaccttcgcactgggcattggttacgctctgtgtagtccgtattacaccgaaccggcatccccgacgctggtgaacgcatcagctgtggcgatggttatctttgaactgctgaatttcgcggttcatgtccagctgagcggcatgcgtaaaggtgatggtgacgcaacccgtccggtgccgaaaggtattctgtttagtctggtttcctgcccgaactacctgtttgaaatcctgtcttgggttgcattctcactgggcacctcgatgctgacgagctggggctttaccttcgctggtctggttcaaatggctgaatgggcggtcaaaaaacacaaaaattacattaaaaccgacccgagcgttcgtaacaaaaaagcgatgctgccgttcctgctgtga

SEQ ID NO: 208 - DNA, 552 bp, Artificial Sequence
  Description of Artificial Sequence: Synthetic tesA' polynucleotide
atggcagcggacacgttattgattctgggtgatagcctgagcgccgggtatcgaatgtctgccagcgcggcctggcctgccttgttgaatgataagtggcagagtaaaacgtcggtagttaatgccagcatcagcggcgacacctcgcaacaaggactggcgcgccttccggctctgctgaaacagcatcagccgcgttgggtgctggttgaactgggcggcaatgacggtttgcgtggttttcagccacagcaaaccgagcaaacgctgcgccagattttgcaggatgtcaaagccgccaacgctgaaccattgttaatgcaaatacgtctgcctgcaaactatggtcgccgttataatgaagcctttagcgccatttaccccaaactcgccaaagagtttgatgttccgctgctgcccttttttatggaagaggtctacctcaagccacaatggatgcaggatgacggtattcatcccaaccgcgacgcccagccgtttattgccgactggatggcgaagcagttgcagcctttagtaaatcatgactca

SEQ ID NO: 209 - DNA, 861 bp, Artificial Sequence
  Description of Artificial Sequence: Synthetic tesB polynucleotide
atgagtcaggcgctaaaaaatttactgacattgttaaatctggaaaaaattgaggaaggactctttcgcggccagagtgaagatttaggtttacgccaggtgtttggcggccaggtcgtgggtcaggccttgtatgctgcaaaagagaccgtccctgaagagcggctggtacattcgtttcacagctactttcttcgccctggcgatagtaagaagccgattatttatgatgtcgaaacgctgcgtgacggtaacagcttcagcgcccgccgggttgctgctattcaaaacggcaaaccgattttttatatgactgcctctttccaggcaccagaagcgggtttcgaacatcaaaaaacaatgccgtccgcgccagcgcctgatggcctcccttcggaaacgcaaatcgcccaatcgctggcgcacctgctgccgccagtgctgaaagataaattcatctgcgatcgtccgctggaagtccgtccggtggagtttcataacccactgaaaggtcacgtcgcagaaccacatcgtcaggtgtggatccgcgcaaatggtagcgtgccggatgacctgcgcgttcatcagtatctgctcggttacgcttctgatcttaacttcctgccggtagctctacagccgcacggcatcggttttctcgaaccggggattcagattgccaccattgaccattccatgtggttccatcgcccgtttaatttgaatgaatggctgctgtatagcgtggagagcacctcggcgtccagcgcacgtggctttgtgcgcggtgagttttatacccaagacggcgtactggttgcctcgaccgttcaggaaggggtgatgcgtaatcacaattaa

SEQ ID NO: 210 - DNA, 156 bp, Artificial Sequence
  Description of Artificial Sequence: Synthetic polynucleotide
gtgcgtaattgtgctgatctcttatatagctgctctcattatctctctaccctgaagtgactctctcacctgtaaaaataatatctcacaggcttaatagtttcttaatacaaagcctgtaaaacgtcaggataacttctgtgtaggaggataatc

SEQ ID NO: 211 - DNA, 177 bp, Artificial Sequence
  Description of Artificial Sequence: Synthetic polynucleotide
cacgtgcgtaattgtgctgatctcttatatagctgctctcattatctctctaccctgaagtgactctctcacctgtaaaaataatatctcacaggcttaatagtttcttaatacaaagcctgtaaaacgtcaggataacttctgtgtaggaggataatccatggaattccgcacgtg

SEQ ID NO: 212 - DNA, 8252 bp, Artificial Sequence
  Description of Artificial Sequence: Synthetic pKK223-mcr polynucleotide
  modified base (1)..(1): Any nucleotide
ngaattcgctagcaggagctaaggaagctaaaatgtccggtacgggtcgtttggctggtaaaattgcattgatcaccggtggtgctggtaacattggttccgagctgacccgccgttttctggccgagggtgcgacggttattatcagcggccgtaaccgtgcgaagctgaccgcgctggccgagcgcatgcaagccgaggccggcgtgccggccaagcgcattgatttggaggtgatggatggttccgaccctgtggctgtccgtgccggtatcgaggcaatcgtcgctcgccacggtcagattgacattctggttaacaacgcgggctccgccggtgcccaacgtcgcttggcggaaattccgctgacggaggcagaattgggtccgggtgcggaggagactttgcacgcttcgatcgcgaatctgttgggcatgggttggcacctgatgcgtattgcggctccgcacatgccagttggctccgcagttatcaacgtttcgactattttctcgcgcgcagagtactatggtcgcattccgtacgttaccccgaaggcagcgctgaacgctttgtcccagctggctgcccgcgagctgggcgctcgtggcatccgcgttaacactattttcccaggtcctattgagtccgaccgcatccgtaccgtgtttcaacgtatggatcaactgaagggtcgcccggagggcgacaccgcccatcactttttgaacaccatgcgcctgtgccgcgcaaacgaccaaggcgctttggaacgccgctttccgtccgttggcgatgttgctgatgcggctgtgtttctggcttctgctgagagcgcggcactgtcgggtgagacgattgaggtcacccacggtatggaactgccggcgtgtagcgaaacctccttgttggcgcgtaccgatctgcgtaccatcgacgcgagcggtcgcactaccctgatttgcgctggcgatcaaattgaagaagttatggccctgacgggcatgctgcgtacgtgcggtagcgaagtgattatcggcttccgttctgcggctgccctggcgcaatttgagcaggcagtgaatgaatctcgccgtctggcaggtgcggatttcaccccgccgatcgctttgccgttggacccacgtgacccggccaccattgatgcggttttcgattggggcgcaggcgagaatacgggtggcatccatgcggcggtcattctgccggcaacctcccacgaaccggctccgtgcgtgattgaagtcgatgacgaacgcgtcctgaatttcctggccgatgaaattaccggcaccatcgttattgcgagccgtttggcgcgctattggcaatcccaacgcctgaccccgggtgcccgtgcccgcggtccgcgtgttatctttctgagcaacggtgccgatcaaaatggtaatgtttacggtcgtattcaatctgcggcgatcggtcaattgattcgcgtttggcgtcacgaggcggagttggactatcaacgtgcatccgccgcaggcgatcacgttctgccgccggtttgggcgaaccagattgtccgtttcgctaaccgctccctggaaggtctggagttcgcgtgcgcgtggaccgcacagctgctgcacagccaacgtcatattaacgaaattacgctgaacattccagccaatattagcgcgaccacgggcgcacgttccgccagcgtcggctgggccgagtccttgattggtctgcacctgggcaaggtggctctgattaccggtggttcggcgggcatcggtggtcaaatcggtcgtctgctggccttgtctggcgcgcgtgtgatgctggccgctcgcgatcgccataaattggaacagatgcaagccatgattcaaagcgaattggcggaggttggttataccgatgtggaggaccgtgtgcacatcgctccgggttgcgatgtgagcagcgaggcgcagctggcagatctggtggaacgtacgctgtccgcattcggtaccgtggattatttgattaataacgccggtattgcgggcgtggaggagatggtgatcgacatgccggtggaaggctggcgtcacaccctgtttgccaacctgatttcgaattattcgctgatgcgcaagttggcgccgctgatgaagaagcaaggtagcggttacatcctgaacgtttcttcctattttggcggtgagaaggacgcggcgattccttatccgaaccgcgccgactacgccgtctccaaggctggccaacgcgcgatggcggaagtgttcgctcgtttcctgggtccagagattcagatcaatgctattgccccaggtccggttgaaggcgaccgcctgcgtggtaccggtgagcgtccgggcctgtttgctcgtcgcgcccgtctgatcttggagaataaacgcctgaacgaattgcacgcggctttgattgctgcggcccgcaccgatgagcgctcgatgcacgagttggttgaattgttgctgccgaacgacgtggccgcgttggagcagaacccagcggcccctaccgcgctgcgtgagctggcacgccgcttccgtagcgaaggtgatccggcggcaagctcctcgtccgccttgctgaatcgctccatcgctgccaagctgttggctcgcttgcataacggtggctatgtgctgccggcggatatttttgcaaatctgcctaatccgccggacccgttctttacccgtgcgcaaattgaccgcgaagctcgcaaggtgcgtgatggtattatgggtatgctgtatctgcagcgtatgccaaccgagtttgacgtcgctatggcaaccgtgtactatctggccgatcgtaacgtgagcggcgaaactttccatccgtctggtggtttgcgctacgagcgtaccccgaccggtggcgagctgttcggcctgccatcgccggaacgtctggcggagctggttggtagcacggtgtacctgatcggtgaacacctgaccgagcacctgaacctgctggctcgtgcctatttggagcgctacggtgcccgtcaagtggtgatgattgttgagacggaaaccggtgcggaaaccatgcgtcgtctgttgcatgatcacgtcgaggcaggtcgcctgatgactattgtggcaggtgatcagattgaggcagcgattgaccaagcgatcacgcgctatggccgtccgggtccggtggtgtgcactccattccgtccactgccaaccgttccgctggtcggtcgtaaagactccgattggagcaccgttttgagcgaggcggaatttgcggaactgtgtgagcatcagctgacccaccatttccgtgttgctcgtaagatcgccttgtcggatggcgcgtcgctggcgttggttaccccggaaacgactgcgactagcaccacggagcaatttgctctggcgaacttcatcaagaccaccctgcacgcgttcaccgcgaccatcggtgttgagtcggagcgcaccgcgcaacgtattctgattaaccaggttgatctgacgcgccgcgcccgtgcggaagagccgcgtgacccgcacgagcgtcagcaggaattggaacgcttcattgaagccgttctgctggttaccgctccgctgcctcctgaggcagacacgcgctacgcaggccgtattcaccgcggtcgtgcgattaccgtctaatagaagcttggctgttttggcggatgagagaagattttcagcctgatacagattaaatcagaacgcagaagcggtctgataaaacagaatttgcctggcggcagtagcgcggtggtcccacctgaccccatgccgaactcagaagtgaaacgccgtagcgccgatggtagtgtggggtctccccatgcgagagtagggaactgccaggcatcaaataaaacgaaaggctcagtcgaaagactgggcctttcgttttatctgttgtttgtcggtgaacgctctcctgagtaggacaaatccgccgggagcggatttgaacgttgcgaagcaacggcccggagggtggcgggcaggacgcccgccataaactgccaggcatcaaattaagcagaaggccatcctgacggatggcctttttgcgtttctacaaactcttttgtttatttttctaaatacattcaaatatgtatccgctcatgagacaataaccctgataaatgcttcaataatattgaaaaaggaagagtatgagtattcaacatttccgtgtcgcccttattcccttttttgcggcattttgccttcctgtttttgctcacccagaaacgctggtgaaagtaaaagatgctgaagatcagttgggtgcacgagtgggttacatcgaactggatctcaacagcggtaagatccttgagagttttcgccccgaagaacgttttccaatgatgagcacttttaaagttctgctatgtggcgcggtattatcccgtgttgacgccgggcaagagcaactcggtcgccgcatacactattctcagaatgacttggttgagtactcaccagtcacagaaaagcatcttacggatggcatgacagtaagagaattatgcagtgctgccataaccatgagtgataacactgcggccaacttacttctgacaacgatcggaggaccgaaggagctaaccgcttttttgcacaacatgggggatcatgtaactcgccttgatcgttgggaaccggagctgaatgaagccataccaaacgacgagcgtgacaccacgatgctgtagcaatggcaacaacgttgcgcaaactattaactggcgaactacttactctagcttcccggcaacaattaatagactggatggaggcggataaagttgcaggaccacttctgcgctcggcccttccggctggctggtttattgctgataaatctggagccggtgagcgtgggtctcgcggtatcattgcagcactggggccagatggtaagccctcccgtatcgtagttatctacacgacggggagtcaggcaactatggatgaacgaaatagacagatcgctgagataggtgcctcactgattaagcattggtaactgtcagaccaagtttactcatatatactttagattgatttaaaacttcatttttaatttaaaaggatctaggtgaagatcctttttgataatctcatgaccaaaatcccttaacgtgagttttcgttccactgagcgtcagaccccgtagaaaagatcaaaggatcttcttgagatcctttttttctgcgcgtaatctgctgcttgcaaacaaaaaaaccaccgctaccagcggtggtttgtttgccggatcaagagctaccaactctttttccgaaggtaactggcttcagcagagcgcagataccaaatactgtccttctagtgtagccgtagttaggccaccacttcaagaactctgtagcaccgcctacatacctcgctctgctaatcctgttaccagtggctgctgccagtggcgataagtcgtgtcttaccgggttggactcaagacgatagttaccggataaggcgcagcggtcgggctgaacggggggttcgtgcacacagcccagcttggagcgaacgacctacaccgaactgagatacctacagcgtgagcattgagaaagcgccacgcttcccgaagggagaaaggcggacaggtatccggtaagcggcagggtcggaacaggagagcgcacgagggagcttccagggggaaacgcctggtatctttatagtcctgtcgggtttcgccacctctgacttgagcgtcgatttttgtgatgctcgtcaggggggcggagcctatggaaaaacgccagcaacgcggcctttttacggttcctggccttttgctggccttttgctcacatgttctttcctgcgttatcccctgattctgtggataaccgtattaccgcctttgagtgagctgataccgctcgccgcagccgaacgaccgagcgcagcgagtcagtgagcgaggaagcggaagagcgcctgatgcggtattttctccttacgcatctgtgcggtatttcacaccgcatatggtgcactctcagtacaatctgctctgatgccgcatagttaagccagtatacactccgctatcgctacgtgactgggtcatggctgcgccccgacacccgccaacacccgctgacgcgccctgacgggcttgtctgctcccggcatccgcttacagacaagctgtgaccgtctccgggagctgcatgtgtcagaggttttcaccgtcatcaccgaaacgcgcgaggcagctgcggtaaagctcatcagcgtggtcgtgaagcgattcacagatgtctgcctgttcatccgcgtccagctcgttgagtttctccagaagcgttaatgtctggcttctgataaagcgggccatgttaagggcggttttttcctgtttggtcactgatgcctccgtgtaagggggatttctgttcatgggggtaatgataccgatgaaacgagagaggatgctcacgatacgggttactgatgatgaacatgcccggttactggaacgttgtgagggtaaacaactggcggtatggatgcggcgggaccagagaaaaatcactcagggtcaatgccagcgcttcgttaatacagatgtaggtgttccacagggtagccagcagcatcctgcgatgcagatccggaacataatggtgcagggcgctgacttccgcgtttccagactttacgaaacacggaaaccgaagaccattcatgttgttgctcaggtcgcagacgttttgcagcagcagtcgcttcacgttcgctcgcgtatcggtgattcattctgctaaccagtaaggcaaccccgccagcctagccgggtcctcaacgacaggagcacgatcatgcgcacccgtggccaggacccaacgctgcccgagatgcgccgcgtgcggctgctggagatggcggacgcgatggatatgttctgccaagggttggtttgcgcattcacagttctccgcaagaattgattggctccaattcttggagtggtgaatccgttagcgaggtgccgccggcttccattcaggtcgaggtggcccggctccatgcaccgcgacgcaacgcggggaggcagacaaggtatagggcggcgcctacaatccatgccaacccgttccatgtgctcgccgaggcggcataaatcgccgtgacgatcagcggtccagtgatcgaagttaggctggtaagagccgcgagcgatccttgaagctgtccctgatggtcgtcatctacctgcctggacagcatggcctgcaacgcgggcatcccgatgccgccggaagcgagaagaatcataatggggaaggccatccagcctcgcgtcgcgaacgccagcaagacgtagcccagcgcgtcggccgccatgccggcgataatggcctgcttctcgccgaaacgtttggtggcgggaccagtgacgaaggcttgagcgagggcgtgcaagattccgaataccgcaagcgacaggccgatcatcgtcgcgctccagcgaaagcggtcctcgccgaaaatgacccagagcgctgccggcacctgtcctacgagttgcatgataaagaagacagtcataagtgcggcgacgatagtcatgccccgcgcccaccggaaggagctgactgggttgaaggctctcaagggcatcggtcgacgctctcccttatgcgactcctgcattaggaagcagcccagtagtaggttgaggccgttgagcaccgccgccgcaaggaatggtgcatgcaaggagatggcgcccaacagtcccccggccacggggcctgccaccatacccacgccgaaacaagcgctcatgagcccgaagtggcgagcccgatcttccccatcggtgatgtcggcgatataggcgccagcaaccgcacctgtggcgccggtgatgccggccacgatgcgtccggcgtagaggatccgggcttatcgactgcacggtgcaccaatgcttctggcgtcaggcagccatcggaagctgtggtatggctgtgcaggtcgtaaatcactgcataattcgtgtcgctcaaggcgcactcccgttctggataatgttttttgcgccgacatcataacggttctggcaaatattctgaaatgagctgttgacaattaatcatcggctcgtataatgtgtggaattgtgagcggataacaatttcacacaggaaaca

SEQ ID NO: 213 - DNA, 1440 bp, Artificial Sequence
  Description of Artificial Sequence: Synthetic pSUCR polynucleotide
taagcttttaccaatgcttaatcagtgaggcacctatctcagcgatctgtctatttcgttcatccatagttgcctgactccccgtcgtgtagataactacgatacgggagggcttaccatctggccccagcgctgcgatgataccgcgagaaccacgctcaccggctccggatttatcagcaataaaccagccagccggaagggccgagcgcagaagtggtcctgcaactttatccgcctccatccagtctattaattgttgccgggaagctagagtaagtagttcgccagttaatagtttgcgcaacgttgttgccatcgctacaggcatcgtggtgtcacgctcgtcgtttggtatggcttcattcagctccggttcccaacgatcaaggcgagttacatgatcccccatgttgtgcaaaaaagcggttagctccttcggtcctccgatcgttgtcagaagtaagttggccgcagtgttatcactcatggttatggcagcactgcataattctcttactgtcatgccatccgtaagatgcttttctgtgactggtgagtactcaaccaagtcattctgagaatagtgtatgcggcgaccgagttgctcttgcccggcgtcaatacgggataataccgcgccacatagcagaactttaaaagtgctcatcattggaaaacgttcttcggggcgaaaactctcaaggatcttaccgctgttgagatccagttcgatgtaacccactcgtgcacccaactgatcttcagcatcttttactttcaccagcgtttctgggtgagcaaaaacaggaaggcaaaatgccgcaaaaaagggaataagggcgacacggaaatgttgaatactcatattcttcctttttcaatattattgaagcatttatcagggttattgtctcatgagcggatacatatttgaatgtatttagaaaaataaacaaataggggtcagtgttacaaccaattaaccaattctgaacattatcgcgagcccatttatacctgaatatggctcataacaccccttgtttgcctggcggcagtagcgcggtggtcccacctgaccccatgccgaactcagaagtgaaacgccgtagcgccgatggtagtgtggggactccccatgcgagagtagggaactgccaggcatcaaataaaacgaaaggctcagtcgaaagactgggcctttcgcccgggctaattatggggtgtcgcccttattcgactctatagggaagttcctattctctagaaagtataggaacttctgaaggggggtcacctcctaactacttaaaattgctatcattcgttattgttatctagttgtgcaaaacattgacatccctatcagtgatagatataatgagcacatgcccaccggcagctgccggtgggccgtattttggatgataacaggag

SEQ ID NO: 214 - DNA, 90 bp, Artificial Sequence
  Description of Artificial Sequence: Synthetic HL021 polynucleotide
atttctgccttttattccttttacacttgtttttatgaagcccttcacagaattgtcctttcacgaaaacattgacatccctatcagtga

SEQ ID NO: 215 - DNA, 90 bp, Artificial Sequence
  Description of Artificial Sequence: Synthetic HL022 polynucleotide
cactcattaagactgtaaataaaccacctgggtctgcagatattcatgcaagccatgtttaccataagcttaacccagttgccacagtgc
